United States Patent Application Publication US 2023/0128001 A1 - sequence listing, part 2

SEQ ID NO: 21012 - protein, 9 aa, synthetic construct
  REGION 1..9: note = Description of Artificial Sequence: Synthetic peptide
ILAEAMSQV

SEQ ID NO: 21013 - protein, 9 aa, synthetic construct
  REGION 1..9: note = Description of Artificial Sequence: Synthetic peptide
AVLSVVNRV

SEQ ID NO: 21014 - protein, 10 aa, synthetic construct
  REGION 1..10: note = Description of Artificial Sequence: Synthetic peptide
ALNPNLLETV

SEQ ID NO: 21015 - protein, 9 aa, synthetic construct
  REGION 1..9: note = Description of Artificial Sequence: Synthetic peptide
ILKEPVHGV

SEQ ID NO: 21016 - protein, 9 aa, synthetic construct
  REGION 1..9: note = Description of Artificial Sequence: Synthetic peptide
SLFNTVATL

SEQ ID NO: 21017 - protein, 9 aa, synthetic construct
  REGION 1..9: note = Description of Artificial Sequence: Synthetic peptide
GLADQLIHI

SEQ ID NO: 21018 - protein, 10 aa, synthetic construct
  REGION 1..10: note = Description of Artificial Sequence: Synthetic peptide
KLVPVDPAEV

SEQ ID NO: 21019 - protein, 9 aa, synthetic construct
  REGION 1..9: note = Description of Artificial Sequence: Synthetic peptide
QLTEAVQKI

SEQ ID NO: 21020 - protein, 9 aa, synthetic construct
  REGION 1..9: note = Description of Artificial Sequence: Synthetic peptide
NLLETVEGC

SEQ ID NO: 21021 - protein, 9 aa, synthetic construct
  REGION 1..9: note = Description of Artificial Sequence: Synthetic peptide
TVLSVVNRV

SEQ ID NO: 21022 - protein, 9 aa, synthetic construct
  REGION 1..9: note = Description of Artificial Sequence: Synthetic peptide
GLLETTEGC

SEQ ID NO: 21023 - protein, 9 aa, synthetic construct
  REGION 1..9: note = Description of Artificial Sequence: Synthetic peptide
ALTEICTEM

SEQ ID NO: 21024 - protein, 10 aa, synthetic construct
  REGION 1..10: note = Description of Artificial Sequence: Synthetic peptide
TLWQRPVVTV

SEQ ID NO: 21025 - protein, 8 aa, synthetic construct
  REGION 1..8: note = Description of Artificial Sequence: Synthetic peptide
ILGDINNL

SEQ ID NO: 21026 - protein, 9 aa, synthetic construct
  REGION 1..9: note = Description of Artificial Sequence: Synthetic peptide
IITQIQPSI

SEQ ID NO: 21027 - protein, 9 aa, synthetic construct
  REGION 1..9: note = Description of Artificial Sequence: Synthetic peptide
ALTDIVPLT

SEQ ID NO: 21028 - protein, 9 aa, synthetic construct
  REGION 1..9: note = Description of Artificial Sequence: Synthetic peptide
SINNETPGV

SEQ ID NO: 21029 - protein, 10 aa, synthetic construct
  REGION 1..10: note = Description of Artificial Sequence: Synthetic peptide
KLVPVDPREV

SEQ ID NO: 21030 - protein, 9 aa, synthetic construct
  REGION 1..9: note = Description of Artificial Sequence: Synthetic peptide
GLGSPQISV

SEQ ID NO: 21031 - protein, 9 aa, synthetic construct
  REGION 1..9: note = Description of Artificial Sequence: Synthetic peptide
IVTDSQYAL

SEQ ID NO: 21032 - protein, 9 aa, synthetic construct
  REGION 1..9: note = Description of Artificial Sequence: Synthetic peptide
VLAEAMSQV

SEQ ID NO: 21033 - protein, 9 aa, synthetic construct
  REGION 1..9: note = Description of Artificial Sequence: Synthetic peptide
ILAEAMSQV

SEQ ID NO: 21034 - protein, 9 aa, synthetic construct
  REGION 1..9: note = Description of Artificial Sequence: Synthetic peptide
ILKEPVHGV

SEQ ID NO: 21035 - protein, 9 aa, synthetic construct
  REGION 1..9: note = Description of Artificial Sequence: Synthetic peptide
QLTEVVQKV

SEQ ID NO: 21036 - protein, 9 aa, synthetic construct
  REGION 1..9: note = Description of Artificial Sequence: Synthetic peptide
SLFNTVATL

SEQ ID NO: 21037 - protein, 10 aa, synthetic construct
  REGION 1..10: note = Description of Artificial Sequence: Synthetic peptide
ALNPNLLETV

SEQ ID NO: 21038 - protein, 10 aa, synthetic construct
  REGION 1..10: note = Description of Artificial Sequence: Synthetic peptide
YLKDQQLLGI

SEQ ID NO: 21039 - protein, 10 aa, synthetic construct
  REGION 1..10: note = Description of Artificial Sequence: Synthetic peptide
YLRDQQLLGI

SEQ ID NO: 21040 - protein, 10 aa, synthetic construct
  REGION 1..10: note = Description of Artificial Sequence: Synthetic peptide
KLVPVDPREV

SEQ ID NO: 21041 - protein, 10 aa, synthetic construct
  REGION 1..10: note = Description of Artificial Sequence: Synthetic peptide
TLWQRPVVTV

SEQ ID NO: 21042 - protein, 9 aa, synthetic construct
  REGION 1..9: note = Description of Artificial Sequence: Synthetic peptide
AVLSVVNRV

SEQ ID NO: 21043 - protein, 8 aa, synthetic construct
  REGION 1..8: note = Description of Artificial Sequence: Synthetic peptide
VLSVVNRV

SEQ ID NO: 21044 - protein, 9 aa, synthetic construct
  REGION 1..9: note = Description of Artificial Sequence: Synthetic peptide
GAASITLTV

SEQ ID NO: 21045 - protein, 9 aa, synthetic construct
  REGION 1..9: note = Description of Artificial Sequence: Synthetic peptide
ALNPGLLET

SEQ ID NO: 21046 - protein, 11 aa, synthetic construct
  REGION 1..11: note = Description of Artificial Sequence: Synthetic peptide
FLKEKGGLDGL

SEQ ID NO: 21047 - protein, 9 aa, synthetic construct
  REGION 1..9: note = Description of Artificial Sequence: Synthetic peptide
QLTEAVQKI

SEQ ID NO: 21048 - protein, 9 aa, synthetic construct
  REGION 1..9: note = Description of Artificial Sequence: Synthetic peptide
KTKPPVPSV

SEQ ID NO: 21049 - protein, 9 aa, synthetic construct
  REGION 1..9: note = Description of Artificial Sequence: Synthetic peptide
SISERLLSA

SEQ ID NO: 21050 - protein, 10 aa, synthetic construct
  REGION 1..10: note = Description of Artificial Sequence: Synthetic peptide
KLVPVDPAEV

SEQ ID NO: 21051 - protein, 10 aa, synthetic construct
  REGION 1..10: note = Description of Artificial Sequence: Synthetic peptide
ALTDIVPLTA

SEQ ID NO: 21052 - protein, 9 aa, synthetic construct
  REGION 1..9: note = Description of Artificial Sequence: Synthetic peptide
ALSPRTLNA

SEQ ID NO: 21053 - protein, 10 aa, synthetic construct
  REGION 1..10: note = Description of Artificial Sequence: Synthetic peptide
GLIGLRIAFA

SEQ ID NO: 21054 - protein, 9 aa, synthetic construct
  REGION 1..9: note = Description of Artificial Sequence: Synthetic peptide
ELKKIIGQV

SEQ ID NO: 21055 - protein, 9 aa, synthetic construct
  REGION 1..9: note = Description of Artificial Sequence: Synthetic peptide
TVLSVVNRV

SEQ ID NO: 21056 - protein, 9 aa, synthetic construct
  REGION 1..9: note = Description of Artificial Sequence: Synthetic peptide
MIIGGLIGL

SEQ ID NO: 21057 - protein, 9 aa, synthetic construct
  REGION 1..9: note = Description of Artificial Sequence: Synthetic peptide
QLRARILAV

SEQ ID NO: 21058 - protein, 9 aa, synthetic construct
  REGION 1..9: note = Description of Artificial Sequence: Synthetic peptide
GLADQLIHI

SEQ ID NO: 21059 - protein, 9 aa, synthetic construct
  REGION 1..9: note = Description of Artificial Sequence: Synthetic peptide
ALFLGFLGA

SEQ ID NO: 21060 - protein, 10 aa, synthetic construct
  REGION 1..10: note = Description of Artificial Sequence: Synthetic peptide
ALFLGFLGAA

SEQ ID NO: 21061 - protein, 10 aa, synthetic construct
  REGION 1..10: note = Description of Artificial Sequence: Synthetic peptide
HLILGDINNL

SEQ ID NO: 21062 - protein, 9 aa, synthetic construct
  REGION 1..9: note = Description of Artificial Sequence: Synthetic peptide
ELRSLFNTV

SEQ ID NO: 21063 - protein, 9 aa, synthetic construct
  REGION 1..9: note = Description of Artificial Sequence: Synthetic peptide
SLYNTIAVL

SEQ ID NO: 21064 - protein, 9 aa, synthetic construct
  REGION 1..9: note = Description of Artificial Sequence: Synthetic peptide
LLNTTAIAV

SEQ ID NO: 21065 - protein, 9 aa, synthetic construct
  REGION 1..9: note = Description of Artificial Sequence: Synthetic peptide
QLTEVVQKV

SEQ ID NO: 21066 - protein, 9 aa, synthetic construct
  REGION 1..9: note = Description of Artificial Sequence: Synthetic peptide
SLFNTVATL

SEQ ID NO: 21067 - protein, 9 aa, synthetic construct
  REGION 1..9: note = Description of Artificial Sequence: Synthetic peptide
AVLSVVNRV

SEQ ID NO: 21068 - protein, 9 aa, synthetic construct
  REGION 1..9: note = Description of Artificial Sequence: Synthetic peptide
TVLSVVNRV

SEQ ID NO: 21069 - protein, 9 aa, synthetic construct
  REGION 1..9: note = Description of Artificial Sequence: Synthetic peptide
ILKEPVHGV

SEQ ID NO: 21070 - protein, 9 aa, synthetic construct
  REGION 1..9: note = Description of Artificial Sequence: Synthetic peptide
ILAIIVWTI

SEQ ID NO: 21071 - protein, 9 aa, synthetic construct
  REGION 1..9: note = Description of Artificial Sequence: Synthetic peptide
LILGNIDNL

SEQ ID NO: 21072 - protein, 9 aa, synthetic construct
  REGION 1..9: note = Description of Artificial Sequence: Synthetic peptide
LILGDINNL

SEQ ID NO: 21073 - protein, 10 aa, synthetic construct
  REGION 1..10: note = Description of Artificial Sequence: Synthetic peptide
ALNPNLLETV

SEQ ID NO: 21074 - protein, 9 aa, synthetic construct
  REGION 1..9: note = Description of Artificial Sequence: Synthetic peptide
GLADQLIHI

SEQ ID NO: 21075 - protein, 9 aa, synthetic construct
  REGION 1..9: note = Description of Artificial Sequence: Synthetic peptide
SLYNTIAVL

SEQ ID NO: 21076 - protein, 9 aa, synthetic construct
  REGION 1..9: note = Description of Artificial Sequence: Synthetic peptide
SLAISIVAL

SEQ ID NO: 21077 - protein, 9 aa, synthetic construct
  REGION 1..9: note = Description of Artificial Sequence: Synthetic peptide
TLNAWVKVI

SEQ ID NO: 21078 - protein, 9 aa, synthetic construct
  REGION 1..9: note = Description of Artificial Sequence: Synthetic peptide
ALFYRLDVL

SEQ ID NO: 21079 - protein, 9 aa, synthetic construct
  REGION 1..9: note = Description of Artificial Sequence: Synthetic peptide
LVNQIIEQL

SEQ ID NO: 21080 - protein, 9 aa, synthetic construct
  REGION 1..9: note = Description of Artificial Sequence: Synthetic peptide
MIIGGLIGL

SEQ ID NO: 21081 - protein, 9 aa, synthetic construct
  REGION 1..9: note = Description of Artificial Sequence: Synthetic peptide
ILAEAMSQV

SEQ ID NO: 21082 - protein, 10 aa, synthetic construct
  REGION 1..10: note = Description of Artificial Sequence: Synthetic peptide
TLWQRPVVTV

SEQ ID NO: 21083 - protein, 8 aa, synthetic construct
  REGION 1..8: note = Description of Artificial Sequence: Synthetic peptide
ILGDINNL

SEQ ID NO: 21084 - protein, 10 aa, synthetic construct
  REGION 1..10: note = Description of Artificial Sequence: Synthetic peptide
HLILGDINNL

SEQ ID NO: 21085 - protein, 10 aa, synthetic construct
  REGION 1..10: note = Description of Artificial Sequence: Synthetic peptide
HLILGNIDNL

SEQ ID NO: 21086 - protein, 9 aa, synthetic construct
  REGION 1..9: note = Description of Artificial Sequence: Synthetic peptide
HLEGKIILV

SEQ ID NO: 21087 - protein, 11 aa, synthetic construct
  REGION 1..11: note = Description of Artificial Sequence: Synthetic peptide
ALFYKLDIVQI

SEQ ID NO: 21088 - protein, 9 aa, synthetic construct
  REGION 1..9: note = Description of Artificial Sequence: Synthetic peptide
RVSALFYKL

SEQ ID NO: 21089 - protein, 9 aa, synthetic construct
  REGION 1..9: note = Description of Artificial Sequence: Synthetic peptide
ALTDIVPLT

SEQ ID NO: 21090 - protein, 11 aa, synthetic construct
  REGION 1..11: note = Description of Artificial Sequence: Synthetic peptide
ILYESNPYPNL

SEQ ID NO: 21091 - protein, 9 aa, synthetic construct
  REGION 1..9: note = Description of Artificial Sequence: Synthetic peptide
LLNTTAIAV

SEQ ID NO: 21092 - protein, 10 aa, synthetic construct
  REGION 1..10: note = Description of Artificial Sequence: Synthetic peptide
RTPDFWEVQL

SEQ ID NO: 21093 - protein, 9 aa, synthetic construct
  REGION 1..9: note = Description of Artificial Sequence: Synthetic peptide
VLAEAMSQV

SEQ ID NO: 21094 - protein, 10 aa, synthetic construct
  REGION 1..10: note = Description of Artificial Sequence: Synthetic peptide
KLVPVDPAEV

SEQ ID NO: 21095 - protein, 10 aa, synthetic construct
  REGION 1..10: note = Description of Artificial Sequence: Synthetic peptide
ALAWDDLRNL

SEQ ID NO: 21096 - protein, 10 aa, synthetic construct
  REGION 1..10: note = Description of Artificial Sequence: Synthetic peptide
TLWQRPIVTI

SEQ ID NO: 21097 - protein, 9 aa, synthetic construct
  REGION 1..9: note = Description of Artificial Sequence: Synthetic peptide
IVTDSQYAL

SEQ ID NO: 21098 - protein, 11 aa, synthetic construct
  REGION 1..11: note = Description of Artificial Sequence: Synthetic peptide
GLLTGERDWHL

SEQ ID NO: 21099 - protein, 8 aa, synthetic construct
  REGION 1..8: note = Description of Artificial Sequence: Synthetic peptide
ILGNIDNL

SEQ ID NO: 21100 - protein, 9 aa, synthetic construct
  REGION 1..9: note = Description of Artificial Sequence: Synthetic peptide
ALNPGLLET

SEQ ID NO: 21101 - protein, 9 aa, synthetic construct
  REGION 1..9: note = Description of Artificial Sequence: Synthetic peptide
WTIEILEEL

SEQ ID NO: 21102 - protein, 9 aa, synthetic construct
  REGION 1..9: note = Description of Artificial Sequence: Synthetic peptide
IITQIQPSI

SEQ ID NO: 21103 - protein, 9 aa, synthetic construct
  REGION 1..9: note = Description of Artificial Sequence: Synthetic peptide
LLQLTVWGI

SEQ ID NO: 21104 - protein, 9 aa, synthetic construct
  REGION 1..9: note = Description of Artificial Sequence: Synthetic peptide
NYSDTIYKL

SEQ ID NO: 21105 - protein, 9 aa, synthetic construct
  REGION 1..9: note = Description of Artificial Sequence: Synthetic peptide
YLWNLILYW

SEQ ID NO: 21106 - protein, 9 aa, synthetic construct
  REGION 1..9: note = Description of Artificial Sequence: Synthetic peptide
TLQEQIAWM

SEQ ID NO: 21107 - protein, 9 aa, synthetic construct
  REGION 1..9: note = Description of Artificial Sequence: Synthetic peptide
AIIRILQQL

SEQ ID NO: 21108 - protein, 11 aa, synthetic construct
  REGION 1..11: note = Description of Artificial Sequence: Synthetic peptide
VQLGIPHPAGL

SEQ ID NO: 21109 - protein, 10 aa, synthetic construct
  REGION 1..10: note = Description of Artificial Sequence: Synthetic peptide
RTQDFWEVQL

SEQ ID NO: 21110 - protein, 10 aa, synthetic construct
  REGION 1..10: note = Description of Artificial Sequence: Synthetic peptide
YLRDQQLLGI

SEQ ID NO: 21111 - protein, 9 aa, synthetic construct
  REGION 1..9: note = Description of Artificial Sequence: Synthetic peptide
SINNETPGV

SEQ ID NO: 21112 - protein, 9 aa, synthetic construct
  REGION 1..9: note = Description of Artificial Sequence: Synthetic peptide
TQVGSLQYL

SEQ ID NO: 21113 - protein, 10 aa, synthetic construct
  REGION 1..10: note = Description of Artificial Sequence: Synthetic peptide
KLVPVDPREV

SEQ ID NO: 21114 - protein, 9 aa, synthetic construct
  REGION 1..9: note = Description of Artificial Sequence: Synthetic peptide
TLQEQITWM

SEQ ID NO: 21115 - protein, 9 aa, synthetic construct
  REGION 1..9: note = Description of Artificial Sequence: Synthetic peptide
NTKNIIVQL

SEQ ID NO: 21116 - protein, 9 aa, synthetic construct
  REGION 1..9: note = Description of Artificial Sequence: Synthetic peptide
KLTPLCVTL

SEQ ID NO: 21117 - protein, 9 aa, synthetic construct
  REGION 1..9: note = Description of Artificial Sequence: Synthetic peptide
LILYWGQEI

SEQ ID NO: 21118 - protein, 9 aa, synthetic construct
  REGION 1..9: note = Description of Artificial Sequence: Synthetic peptide
QLTEVVQKV

SEQ ID NO: 21119 - protein, 9 aa, synthetic construct
  REGION 1..9: note = Description of Artificial Sequence: Synthetic peptide
TQVGSLQYL

SEQ ID NO: 21120 - protein, 9 aa, synthetic construct
  REGION 1..9: note = Description of Artificial Sequence: Synthetic peptide
LILGDINNL

SEQ ID NO: 21121 - protein, 9 aa, synthetic construct
  REGION 1..9: note = Description of Artificial Sequence: Synthetic peptide
VLAEAMSQV

SEQ ID NO: 21122 - protein, 9 aa, synthetic construct
  REGION 1..9: note = Description of Artificial Sequence: Synthetic peptide
ILAEAMSQV

SEQ ID NO: 21123 - protein, 9 aa, synthetic construct
  REGION 1..9: note = Description of Artificial Sequence: Synthetic peptide
AVLSVVNRV

SEQ ID NO: 21124 - protein, 9 aa, synthetic construct
  REGION 1..9: note = Description of Artificial Sequence: Synthetic peptide
AVAEGTDRI

SEQ ID NO: 21125 - protein, 9 aa, synthetic construct
  REGION 1..9: note = Description of Artificial Sequence: Synthetic peptide
TVLSVVNRV

SEQ ID NO: 21126 - protein, 11 aa, synthetic construct
  REGION 1..11: note = Description of Artificial Sequence: Synthetic peptide
TQVDPGLADQL

SEQ ID NO: 21127 - protein, 9 aa, synthetic construct
  REGION 1..9: note = Description of Artificial Sequence: Synthetic peptide
QISSISERL

SEQ ID NO: 21128 - protein, 9 aa, synthetic construct
  REGION 1..9: note = Description of Artificial Sequence: Synthetic peptide
LILGNIDNL

SEQ ID NO: 21129 - protein, 9 aa, synthetic construct
  REGION 1..9: note = Description of Artificial Sequence: Synthetic peptide
WTVNDIQKL

SEQ ID NO: 21130 - protein, 9 aa, synthetic construct
  REGION 1..9: note = Description of Artificial Sequence: Synthetic peptide
ATLEEMMTA

SEQ ID NO: 21131 - protein, 9 aa, synthetic construct
  REGION 1..9: note = Description of Artificial Sequence: Synthetic peptide
GAASITLTV

SEQ ID NO: 21132 - protein, 9 aa, synthetic construct
  REGION 1..9: note = Description of Artificial Sequence: Synthetic peptide
IVTDSQYAL

SEQ ID NO: 21133 - protein, 9 aa, synthetic construct
  REGION 1..9: note = Description of Artificial Sequence: Synthetic peptide
WTIEILEEL

SEQ ID NO: 21134 - protein, 9 aa, synthetic construct
  REGION 1..9: note = Description of Artificial Sequence: Synthetic peptide
SQSEIWENM

SEQ ID NO: 21135 - protein, 9 aa, synthetic construct
  REGION 1..9: note = Description of Artificial Sequence: Synthetic peptide
MIIGGLIGL

SEQ ID NO: 21136 - protein, 9 aa, synthetic construct
  REGION 1..9: note = Description of Artificial Sequence: Synthetic peptide
SLFNTVATL

SEQ ID NO: 21137 - protein, 9 aa, synthetic construct
  REGION 1..9: note = Description of Artificial Sequence: Synthetic peptide
VVIQDNSEI

SEQ ID NO: 21138 - protein, 9 aa, synthetic construct
  REGION 1..9: note = Description of Artificial Sequence: Synthetic peptide
LVNQIIEQL

SEQ ID NO: 21139 - protein, 11 aa, synthetic construct
  REGION 1..11: note = Description of Artificial Sequence: Synthetic peptide
TQVEPDLADQL

SEQ ID NO: 21140 - protein, 9 aa, synthetic construct
  REGION 1..9: note = Description of Artificial Sequence: Synthetic peptide
FTSAVVKAA

SEQ ID NO: 21141 - protein, 9 aa, synthetic construct
  REGION 1..9: note = Description of Artificial Sequence: Synthetic peptide
ASITLTVQA

SEQ ID NO: 21142 - protein, 10 aa, synthetic construct
  REGION 1..10: note = Description of Artificial Sequence: Synthetic peptide
SQYALGIIQA

SEQ ID NO: 21143 - protein, 9 aa, synthetic construct
  REGION 1..9: note = Description of Artificial Sequence: Synthetic peptide
NIIVQLNEA

SEQ ID NO: 21144 - protein, 10 aa, synthetic construct
  REGION 1..10: note = Description of Artificial Sequence: Synthetic peptide
REFSSEQTRA

SEQ ID NO: 21145 - protein, 9 aa, synthetic construct
  REGION 1..9: note = Description of Artificial Sequence: Synthetic peptide
SISERLLSA

SEQ ID NO: 21146 - protein, 9 aa, synthetic construct
  REGION 1..9: note = Description of Artificial Sequence: Synthetic peptide
SQVTNPVVM

SEQ ID NO: 21147 - protein, 9 aa, synthetic construct
  REGION 1..9: note = Description of Artificial Sequence: Synthetic peptide
SQIFPGIKV

SEQ ID NO: 21148 - protein, 9 aa, synthetic construct
  REGION 1..9: note = Description of Artificial Sequence: Synthetic peptide
NTSTITQTC

SEQ ID NO: 21149 - protein, 9 aa, synthetic construct
  REGION 1..9: note = Description of Artificial Sequence: Synthetic peptide
RAIEAQQHL

SEQ ID NO: 21150 - protein, 10 aa, synthetic construct
  REGION 1..10: note = Description of Artificial Sequence: Synthetic peptide
SSISERLLSA

SEQ ID NO: 21151 - protein, 9 aa, synthetic construct
  REGION 1..9: note = Description of Artificial Sequence: Synthetic peptide
QLTEAVQKI

SEQ ID NO: 21152 - protein, 11 aa, synthetic construct
  REGION 1..11: note = Description of Artificial Sequence: Synthetic peptide
VVIQDNSEIKV

SEQ ID NO: 21153 - protein, 10 aa, synthetic construct
  REGION 1..10: note = Description of Artificial Sequence: Synthetic peptide
HLILGDINNL

SEQ ID NO: 21154 - protein, 9 aa, synthetic construct
  REGION 1..9: note = Description of Artificial Sequence: Synthetic peptide
SQIYPGIKV

SEQ ID NO: 21155 - protein, 9 aa, synthetic construct
  REGION 1..9: note = Description of Artificial Sequence: Synthetic peptide
FTSTVVKAA

SEQ ID NO: 21156 - protein, 9 aa, synthetic construct
  REGION 1..9: note = Description of Artificial Sequence: Synthetic peptide
NTKNIIVQL

SEQ ID NO: 21157 - protein, 9 aa, synthetic construct
  REGION 1..9: note = Description of Artificial Sequence: Synthetic peptide
TETLLVQNA

SEQ ID NO: 21158 - protein, 9 aa, synthetic construct
  REGION 1..9: note = Description of Artificial Sequence: Synthetic peptide
IEVKDTKEA

SEQ ID NO: 21159 - protein, 9 aa, synthetic construct
  REGION 1..9: note = Description of Artificial Sequence: Synthetic peptide
LETEPIVGA

SEQ ID NO: 21160 - protein, 9 aa, synthetic construct
  REGION 1..9: note = Description of Artificial Sequence: Synthetic peptide
ILKEPVHGV

SEQ ID NO: 21161 - protein, 9 aa, synthetic construct
  REGION 1..9: note = Description of Artificial Sequence: Synthetic peptide
DIIGDIRQA

SEQ ID NO: 21162 - protein, 9 aa, synthetic construct
  REGION 1..9: note = Description of Artificial Sequence: Synthetic peptide
QLTEVVQKV

SEQ ID NO: 21163 - protein, 9 aa, synthetic construct
  REGION 1..9: note = Description of Artificial Sequence: Synthetic peptide
AVLSVVNRV

SEQ ID NO: 21164 - protein, 9 aa, synthetic construct
  REGION 1..9: note = Description of Artificial Sequence: Synthetic peptide
IVTDSQYAL

SEQ ID NO: 21165 - protein, 9 aa, synthetic construct
  REGION 1..9: note = Description of Artificial Sequence: Synthetic peptide
IQDNSEIKV

SEQ ID NO: 21166 - protein, 9 aa, synthetic construct
  REGION 1..9: note = Description of Artificial Sequence: Synthetic peptide
TVLSVVNRV

SEQ ID NO: 21167 - protein, 9 aa, synthetic construct
  REGION 1..9: note = Description of Artificial Sequence: Synthetic peptide
TQVGSLQYL

SEQ ID NO: 21168 - protein, 9 aa, synthetic construct
  REGION 1..9: note = Description of Artificial Sequence: Synthetic peptide
VLAEAMSQV

SEQ ID NO: 21169 - protein, 9 aa, synthetic construct
  REGION 1..9: note = Description of Artificial Sequence: Synthetic peptide
TVTQACPKV

SEQ ID NO: 21170 - protein, 9 aa, synthetic construct
  REGION 1..9: note = Description of Artificial Sequence: Synthetic peptide
ILAEAMSQV

SEQ ID NO: 21171 - protein, 11 aa, synthetic construct
  REGION 1..11: note = Description of Artificial Sequence: Synthetic peptide
TQVDPGLADQL

SEQ ID NO: 21172 - protein, 11 aa, synthetic construct
  REGION 1..11: note = Description of Artificial Sequence: Synthetic peptide
VVIQDNSEIKV

SEQ ID NO: 21173 - protein, 9 aa, synthetic construct
  REGION 1..9: note = Description of Artificial Sequence: Synthetic peptide
GGIGGFIKV

SEQ ID NO: 21174 - protein, 9 aa, synthetic construct
  REGION 1..9: note = Description of Artificial Sequence: Synthetic peptide
SQIYPGIKV

SEQ ID NO: 21175 - protein, 9 aa, synthetic construct
  REGION 1..9: note = Description of Artificial Sequence: Synthetic peptide
LILGDINNL

SEQ ID NO: 21176 - protein, 9 aa, synthetic construct
  REGION 1..9: note = Description of Artificial Sequence: Synthetic peptide
SQIFPGIKV

SEQ ID NO: 21177 - protein, 10 aa, synthetic construct
  REGION 1..10: note = Description of Artificial Sequence: Synthetic peptide
TVLDVGDAYF

SEQ ID NO: 21178 - protein, 9 aa, synthetic construct
  REGION 1..9: note = Description of Artificial Sequence: Synthetic peptide
MIIGGLIGL

SEQ ID NO: 21179 - protein, 11 aa, synthetic construct
  REGION 1..11: note = Description of Artificial Sequence: Synthetic peptide
TQVEPDLADQL

SEQ ID NO: 21180 - protein, 9 aa, synthetic construct
  REGION 1..9: note = Description of Artificial Sequence: Synthetic peptide
VVIQDNSEI

SEQ ID NO: 21181 - protein, 9 aa, synthetic construct
  REGION 1..9: note = Description of Artificial Sequence: Synthetic peptide
VQLNETVQI

SEQ ID NO: 21182 - protein, 9 aa, synthetic construct
  REGION 1..9: note = Description of Artificial Sequence: Synthetic peptide
LILGNIDNL

SEQ ID NO: 21183 - protein, 9 aa, synthetic construct
  REGION 1..9: note = Description of Artificial Sequence: Synthetic peptide
GAASITLTV

SEQ ID NO: 21184 - protein, 9 aa, synthetic construct
  REGION 1..9: note = Description of Artificial Sequence: Synthetic peptide
QLTEAVQKI

SEQ ID NO: 21185 - protein, 11 aa, synthetic construct
  REGION 1..11: note = Description of Artificial Sequence: Synthetic peptide
KTPPAADGVGA

SEQ ID NO: 21186 - protein, 9 aa, synthetic construct
  REGION 1..9: note = Description of Artificial Sequence: Synthetic peptide
YQLETEPIV

SEQ ID NO: 21187 - protein, 9 aa, synthetic construct
  REGION 1..9: note = Description of Artificial Sequence: Synthetic peptide
WTIEILEEL

SEQ ID NO: 21188 - protein, 9 aa, synthetic construct
  REGION 1..9: note = Description of Artificial Sequence: Synthetic peptide
IITQIQPSI

SEQ ID NO: 21189 - protein, 9 aa, synthetic construct
  REGION 1..9: note = Description of Artificial Sequence: Synthetic peptide
NIIVQLNEA

SEQ ID NO: 21190 - protein, 9 aa, synthetic construct
  REGION 1..9: note = Description of Artificial Sequence: Synthetic peptide
AVAEGTDRI

SEQ ID NO: 21191 - protein, 9 aa, synthetic construct
  REGION 1..9: note = Description of Artificial Sequence: Synthetic peptide
KTPPAADGV

SEQ ID NO: 21192 - protein, 9 aa, synthetic construct
  REGION 1..9: note = Description of Artificial Sequence: Synthetic peptide
LVPVDPAEV

SEQ ID NO: 21193 - protein, 9 aa, synthetic construct
  REGION 1..9: note = Description of Artificial Sequence: Synthetic peptide
YVDRFFKTL

SEQ ID NO: 21194 - protein, 9 aa, synthetic construct
  REGION 1..9: note = Description of Artificial Sequence: Synthetic peptide
QLTEVVQKV

SEQ ID NO: 21195 - protein, 9 aa, synthetic construct
  REGION 1..9: note = Description of Artificial Sequence: Synthetic peptide
AVLSVVNRV

SEQ ID NO: 21196 - protein, 9 aa, synthetic construct
  REGION 1..9: note = Description of Artificial Sequence: Synthetic peptide
TVLSVVNRV

SEQ ID NO: 21197 - protein, 9 aa, synthetic construct
  REGION 1..9: note = Description of Artificial Sequence: Synthetic peptide
ILKEPVHGV

SEQ ID NO: 21198 - protein, 9 aa, synthetic construct
  REGION 1..9: note = Description of Artificial Sequence: Synthetic peptide
YVDRFFRVL

SEQ ID NO: 21199 - protein, 9 aa, synthetic construct
  REGION 1..9: note = Description of Artificial Sequence: Synthetic peptide
ILAEAMSQV

SEQ ID NO: 21200 - protein, 9 aa, synthetic construct
  REGION 1..9: note = Description of Artificial Sequence: Synthetic peptide
FSPEVIPMF

SEQ ID NO: 21201 - protein, 9 aa, synthetic construct
  REGION 1..9: note = Description of Artificial Sequence: Synthetic peptide
VLAEAMSQV

SEQ ID NO: 21202 - protein, 9 aa, synthetic construct
  REGION 1..9: note = Description of Artificial Sequence: Synthetic peptide
HLEGKIILV

SEQ ID NO: 21203 - protein, 10 aa, synthetic construct
  REGION 1..10: note = Description of Artificial Sequence: Synthetic peptide
TLWQRPVVTV

SEQ ID NO: 21204 - protein, 9 aa, synthetic construct
  REGION 1..9: note = Description of Artificial Sequence: Synthetic peptide
NADKLWVTV

SEQ ID NO: 21205 - protein, 9 aa, synthetic construct
  REGION 1..9: note = Description of Artificial Sequence: Synthetic peptide
YSDTIYKLI

SEQ ID NO: 21206 - protein, 9 aa, synthetic construct
  REGION 1..9: note = Description of Artificial Sequence: Synthetic peptide
QLTEVVQKV

SEQ ID NO: 21207 - protein, 9 aa, synthetic construct
  REGION 1..9: note = Description of Artificial Sequence: Synthetic peptide
KVISITETT

SEQ ID NO: 21208 - protein, 9 aa, synthetic construct
  REGION 1..9: note = Description of Artificial Sequence: Synthetic peptide
KVVSITETT

SEQ ID NO: 21209 - protein, 9 aa, synthetic construct
  REGION 1..9: note = Description of Artificial Sequence: Synthetic peptide
KTPPAADGV

SEQ ID NO: 21210 - protein, 9 aa, synthetic construct
  REGION 1..9: note = Description of Artificial Sequence: Synthetic peptide
AVLSVVNRV

SEQ ID NO: 21211 - protein, 10 aa, synthetic construct
  REGION 1..10: note = Description of Artificial Sequence: Synthetic peptide
KQISSISERL

SEQ ID NO: 21212 - protein, 9 aa, synthetic construct
  REGION 1..9: note = Description of Artificial Sequence: Synthetic peptide
WTVNDIQKL

SEQ ID NO: 21213 - protein, 9 aa, synthetic construct
  REGION 1..9: note = Description of Artificial Sequence: Synthetic peptide
KTKPPVPSV

SEQ ID NO: 21214 - protein, 9 aa, synthetic construct
  REGION 1..9: note = Description of Artificial Sequence: Synthetic peptide
ILAEAMSQV

SEQ ID NO: 21215 - protein, 9 aa, synthetic construct
  REGION 1..9: note = Description of Artificial Sequence: Synthetic peptide
AIIRILQQL

SEQ ID NO: 21216 - protein, 10 aa, synthetic construct
  REGION 1..10: note = Description of Artificial Sequence: Synthetic peptide
KQLTEVVQKV

SEQ ID NO: 21217 - protein, 11 aa, synthetic construct
  REGION 1..11: note = Description of Artificial Sequence: Synthetic peptide
KTPPAADGVGA

SEQ ID NO: 21218 - protein, 9 aa, synthetic construct
  REGION 1..9: note = Description of Artificial Sequence: Synthetic peptide
MIIGGLIGL

SEQ ID NO: 21219 - protein, 9 aa, synthetic construct
  REGION 1..9: note = Description of Artificial Sequence: Synthetic peptide
TQVGSLQYL

SEQ ID NO: 21220 - protein, 9 aa, synthetic construct
  REGION 1..9: note = Description of Artificial Sequence: Synthetic peptide
VLAEAMSQV

SEQ ID NO: 21221 - protein, 9 aa, synthetic construct
  REGION 1..9: note = Description of Artificial Sequence: Synthetic peptide
LILGDINNL

SEQ ID NO: 21222 - protein, 10 aa, synthetic construct
  REGION 1..10: note = Description of Artificial Sequence: Synthetic peptide
KAYETEVHNV

SEQ ID NO: 21223 - protein, 10 aa, synthetic construct
  REGION 1..10: note = Description of Artificial Sequence: Synthetic peptide
RVLAEAMSQV

SEQ ID NO: 21224 - protein, 10 aa, synthetic construct
  REGION 1..10: note = Description of Artificial Sequence: Synthetic peptide
KLVPVDPAEV

SEQ ID NO: 21225 - protein, 9 aa, synthetic construct
  REGION 1..9: note = Description of Artificial Sequence: Synthetic peptide
IITQIQPSI

SEQ ID NO: 21226 - protein, 9 aa, synthetic construct
  REGION 1..9: note = Description of Artificial Sequence: Synthetic peptide
TVLSVVNRV

SEQ ID NO: 21227 - protein, 9 aa, synthetic construct
  REGION 1..9: note = Description of Artificial Sequence: Synthetic peptide
LETEPIVGA

SEQ ID NO: 21228 - protein, 10 aa, synthetic construct
  REGION 1..10: note = Description of Artificial Sequence: Synthetic peptide
HLILGDINNL

SEQ ID NO: 21229 - protein, 9 aa, synthetic construct
  REGION 1..9: note = Description of Artificial Sequence: Synthetic peptide
IEVKDTKEA

SEQ ID NO: 21230 - protein, 9 aa, synthetic construct
  REGION 1..9: note = Description of Artificial Sequence: Synthetic peptide
IVQQQNNLL

SEQ ID NO: 21231 - protein, 9 aa, synthetic construct
  REGION 1..9: note = Description of Artificial Sequence: Synthetic peptide
ILKEPVHGV

SEQ ID NO: 21232 - protein, 9 aa, synthetic construct
  REGION 1..9: note = Description of Artificial Sequence: Synthetic peptide
FTSAVVKAA

SEQ ID NO: 21233 - protein, 9 aa, synthetic construct
  REGION 1..9: note = Description of Artificial Sequence: Synthetic peptide
FTSTVVKAA

SEQ ID NO: 21234 - protein, 9 aa, synthetic construct
  REGION 1..9: note = Description of Artificial Sequence: Synthetic peptide
QIYPGIKVK

SEQ ID NO: 21235 - protein, 10 aa, synthetic construct
  REGION 1..10: note = Description of Artificial Sequence: Synthetic peptide
VTNPVVMMQK

SEQ ID NO: 21236 - protein, 9 aa, synthetic construct
  REGION 1..9: note = Description of Artificial Sequence: Synthetic peptide
QIFPGIKVK

SEQ ID NO: 21237 - protein, 9 aa, synthetic construct
  REGION 1..9: note = Description of Artificial Sequence: Synthetic peptide
RTTTPYASK

SEQ ID NO: 21238 - protein, 11 aa, synthetic construct
  REGION 1..11: note = Description of Artificial Sequence: Synthetic peptide
KTKPPVPSVQK

SEQ ID NO: 21239 - protein, 9 aa, synthetic construct
  REGION 1..9: note = Description of Artificial Sequence: Synthetic peptide
AVRKAILGH

SEQ ID NO: 21240 - protein, 10 aa, synthetic construct
  REGION 1..10: note = Description of Artificial Sequence: Synthetic peptide
GTNFTSTVVK

SEQ ID NO: 21241 - protein, 10 aa, synthetic construct
  REGION 1..10: note = Description of Artificial Sequence: Synthetic peptide
VTNSAVMMQR

SEQ ID NO: 21242 - protein, 9 aa, synthetic construct
  REGION 1..9: note = Description of Artificial Sequence: Synthetic peptide
AIFQHSMTK

SEQ ID NO: 21243 - protein, 10 aa, synthetic construct
  REGION 1..10: note = Description of Artificial Sequence: Synthetic peptide
TVYYGVPVWK

SEQ ID NO: 21244 - protein, 11 aa, synthetic construct
  REGION 1..11: note = Description of Artificial Sequence: Synthetic peptide
TVNDIQKLVGK

SEQ ID NO: 21245 - protein, 9 aa, synthetic construct
  REGION 1..9: note = Description of Artificial Sequence: Synthetic peptide
STITQTCPK

SEQ ID NO: 21246 - protein, 9 aa, synthetic construct
  REGION 1..9: note = Description of Artificial Sequence: Synthetic peptide
ALTALIAPK

SEQ ID NO: 21247 - protein, 10 aa, synthetic construct
  REGION 1..10: note = Description of Artificial Sequence: Synthetic peptide
SLFGNDPLSQ

SEQ ID NO: 21248 - protein, 10 aa, synthetic construct
  REGION 1..10: note = Description of Artificial Sequence: Synthetic peptide
VTNPVVMMQK

SEQ ID NO: 21249 - protein, 11 aa, synthetic construct
  REGION 1..11: note = Description of Artificial Sequence: Synthetic peptide
TVNDIQKLVGK

SEQ ID NO: 21250 - protein, 9 aa, synthetic construct
  REGION 1..9: note = Description of Artificial Sequence: Synthetic peptide
QIYPGIKVK

SEQ ID NO: 21251 - protein, 10 aa, synthetic construct
  REGION 1..10: note = Description of Artificial Sequence: Synthetic peptide
GTNFTSTVVK

SEQ ID NO: 21252 - protein, 11 aa, synthetic construct
  REGION 1..11: note = Description of Artificial Sequence: Synthetic peptide
VVSITETTNQK

SEQ ID NO: 21253 - protein, 10 aa, synthetic construct
  REGION 1..10: note = Description of Artificial Sequence: Synthetic peptide
GSNFTSAVVK

SEQ ID NO: 21254 - protein, 9 aa, synthetic construct
  REGION 1..9: note = Description of Artificial Sequence: Synthetic peptide
GLDGLIYSK

SEQ ID NO: 21255 - protein, 9 aa, synthetic construct
  REGION 1..9: note = Description of Artificial Sequence: Synthetic peptide
RTTTPYASK

SEQ ID NO: 21256 - protein, 10 aa, synthetic construct
  REGION 1..10: note = Description of Artificial Sequence: Synthetic peptide
TVQPIQLPDK

SEQ ID NO: 21257 - protein, 9 aa, synthetic construct
  REGION 1..9: note = Description of Artificial Sequence: Synthetic peptide
QIFPGIKVK

SEQ ID NO: 21258 - protein, 11 aa, synthetic construct
  REGION 1..11: note = Description of Artificial Sequence: Synthetic peptide
QVTNPVVMMQK

SEQ ID NO: 21259 - protein, 9 aa, synthetic construct
  REGION 1..9: note = Description of Artificial Sequence: Synthetic peptide
APAGFAILK

SEQ ID NO: 21260 - protein, 9 aa, synthetic construct
  REGION 1..9: note = Description of Artificial Sequence: Synthetic peptide
ALTALIAPK

SEQ ID NO: 21261 - protein, 9 aa, synthetic construct
  REGION 1..9: note = Description of Artificial Sequence: Synthetic peptide
KQLTEVVQK

SEQ ID NO: 21262 - protein, 11 aa, synthetic construct
  REGION 1..11: note = Description of Artificial Sequence: Synthetic peptide
KTKPPVPSVQK

SEQ ID NO: 21263 - protein, 11 aa, synthetic construct
  REGION 1..11: note = Description of Artificial Sequence: Synthetic peptide
QSQGVVESMNK

SEQ ID NO: 21264 - protein, 9 aa, synthetic construct
  REGION 1..9: note = Description of Artificial Sequence: Synthetic peptide
SNFTSAVVK

SEQ ID NO: 21265 - protein, 9 aa, synthetic construct
  REGION 1..9: note = Description of Artificial Sequence: Synthetic peptide
ASDAKAYEK

SEQ ID NO: 21266 - protein, 9 aa, synthetic construct
  REGION 1..9: note = Description of Artificial Sequence: Synthetic peptide
STITQTCPK

SEQ ID NO: 21267 - protein, 9 aa, synthetic construct
  REGION 1..9: note = Description of Artificial Sequence: Synthetic peptide
SITETTNQK

SEQ ID NO: 21268 - protein, 9 aa, synthetic construct
  REGION 1..9: note = Description of Artificial Sequence: Synthetic peptide
IIATDIQTK

SEQ ID NO: 21269 - protein, 10 aa, synthetic construct
  REGION 1..10: note = Description of Artificial Sequence: Synthetic peptide
VTNSAVMMQR

SEQ ID NO: 21270 - protein, 11 aa, synthetic construct
  REGION 1..11: note = Description of Artificial Sequence: Synthetic peptide
VISITETTNQK

SEQ ID NO: 21271 - protein, 9 aa, synthetic construct
  REGION 1..9: note = Description of Artificial Sequence: Synthetic peptide
KQLTEAVQK

SEQ ID NO: 21272 - protein, 11 aa, synthetic construct
  REGION 1..11: note = Description of Artificial Sequence: Synthetic peptide
ATDIQTKELQK

SEQ ID NO: 21273 - protein, 9 aa, synthetic construct
  REGION 1..9: note = Description of Artificial Sequence: Synthetic peptide
AIFQHSMTK

SEQ ID NO: 21274 - protein, 10 aa, synthetic construct
  REGION 1..10: note = Description of Artificial Sequence: Synthetic peptide
VVESMNKELK

SEQ ID NO: 21275 - protein, 10 aa, synthetic construct
  REGION 1..10: note = Description of Artificial Sequence: Synthetic peptide
VTNPVVMMQK

SEQ ID NO: 21276 - protein, 10 aa, synthetic construct
  REGION 1..10: note = Description of Artificial Sequence: Synthetic peptide
GTNFTSTVVK

SEQ ID NO: 21277 - protein, 9 aa, synthetic construct
  REGION 1..9: note = Description of Artificial Sequence: Synthetic peptide
STITQTCPK

SEQ ID NO: 21278 - protein, 9 aa, synthetic construct
  REGION 1..9: note = Description of Artificial Sequence: Synthetic peptide
QIYPGIKVK

SEQ ID NO: 21279 - protein, 10 aa, synthetic construct
  REGION 1..10: note = Description of Artificial Sequence: Synthetic peptide
GSNFTSAVVK

SEQ ID NO: 21280 - protein, 11 aa, synthetic construct
  REGION 1..11: note = Description of Artificial Sequence: Synthetic peptide
TVNDIQKLVGK

SEQ ID NO: 21281 - protein, 9 aa, synthetic construct
  REGION 1..9: note = Description of Artificial Sequence: Synthetic peptide
APAGFAILK

SEQ ID NO: 21282 - protein, 9 aa, synthetic construct
  REGION 1..9: note = Description of Artificial Sequence: Synthetic peptide
QIFPGIKVK

SEQ ID NO: 21283 - protein, 10 aa, synthetic construct
  REGION 1..10: note = Description of Artificial Sequence: Synthetic peptide
VTNSAVMMQR

SEQ ID NO: 21284 - protein, 9 aa, synthetic construct
  REGION 1..9: note = Description of Artificial Sequence: Synthetic peptide
ASDAKAYEK

SEQ ID NO: 21285 - protein, 9 aa, synthetic construct
  REGION 1..9: note = Description of Artificial Sequence: Synthetic peptide
STVTQACPK

SEQ ID NO: 21286 - protein, 9 aa, synthetic construct
  REGION 1..9: note = Description of Artificial Sequence: Synthetic peptide
RTTTPYASK

SEQ ID NO: 21287 - protein, 11 aa, synthetic construct
  REGION 1..11: note = Description of Artificial Sequence: Synthetic peptide
ATDIQTKELQK

SEQ ID NO: 21288 - protein, 10 aa, synthetic construct
  REGION 1..10: note = Description of Artificial Sequence: Synthetic peptide
GGLDGLIYSK

SEQ ID NO: 21289 - protein, 9 aa, synthetic construct
  REGION 1..9: note = Description of Artificial Sequence: Synthetic peptide
AVLYFVHQK

SEQ ID NO: 21290 - protein, 9 aa, synthetic construct
  REGION 1..9: note = Description of Artificial Sequence: Synthetic peptide
SNFTSAVVK

SEQ ID NO: 21291 - protein, 9 aa, synthetic construct
  REGION 1..9: note = Description of Artificial Sequence: Synthetic peptide
SITETTNQK

SEQ ID NO: 21292 - protein, 9 aa, synthetic construct
  REGION 1..9: note = Description of Artificial Sequence: Synthetic peptide
GNYSDTIYK

SEQ ID NO: 21293 - protein, 11 aa, synthetic construct
  REGION 1..11: note = Description of Artificial Sequence: Synthetic peptide
QVTNPVVMMQK

SEQ ID NO: 21294 - protein, 10 aa, synthetic construct
  REGION 1..10: note = Description of Artificial Sequence: Synthetic peptide
VSITETTNQK

SEQ ID NO: 21295 - protein, 9 aa, synthetic construct
  REGION 1..9: note = Description of Artificial Sequence: Synthetic peptide
QIIEQLIKK

SEQ ID NO: 21296 - protein, 9 aa, synthetic construct
  REGION 1..9: note = Description of Artificial Sequence: Synthetic peptide
KQLTEVVQK

SEQ ID NO: 21297 - protein, 10 aa, synthetic construct
  REGION 1..10: note = Description of Artificial Sequence: Synthetic peptide
ATEGIVIWGK

SEQ ID NO: 21298 - protein, 10 aa, synthetic construct
  REGION 1..10: note = Description of Artificial Sequence: Synthetic peptide
SQIYPGIKVK

SEQ ID NO: 21299 - protein, 9 aa, synthetic construct
  REGION 1..9: note = Description of Artificial Sequence: Synthetic peptide
LTALIAPKK

SEQ ID NO: 21300 - protein, 11 aa, synthetic construct
  REGION 1..11: note = Description of Artificial Sequence: Synthetic peptide
GVVESMNKELK

SEQ ID NO: 21301 - protein, 11 aa, synthetic construct
  REGION 1..11: note = Description of Artificial Sequence: Synthetic peptide
QVTNSAVMMQR

SEQ ID NO: 21302 - protein, 9 aa, synthetic construct
  REGION 1..9: note = Description of Artificial Sequence: Synthetic peptide
GLDGLIYSK

SEQ ID NO: 21303 - protein, 10 aa, synthetic construct
  REGION 1..10: note = Description of Artificial Sequence: Synthetic peptide
ISITETTNQK

SEQ ID NO: 21304 - protein, 10 aa, synthetic construct
  REGION 1..10: note = Description of Artificial Sequence: Synthetic peptide
SVLSGGKLDK

SEQ ID NO: 21305 - protein, 9 aa, synthetic construct
  REGION 1..9: note = Description of Artificial Sequence: Synthetic peptide
ALTALIAPK

SEQ ID NO: 21306 - protein, 11 aa, synthetic construct
  REGION 1..11: note = Description of Artificial Sequence: Synthetic peptide
YVDGAAHRETK

SEQ ID NO: 21307 - protein, 11 aa, synthetic construct
  REGION 1..11: note = Description of Artificial Sequence: Synthetic peptide
KTKPPVPSVQK

SEQ ID NO: 21308 - protein, 11 aa, synthetic construct
  REGION 1..11: note = Description of Artificial Sequence: Synthetic peptide
VVSITETTNQK

SEQ ID NO: 21309 - protein, 9 aa, synthetic construct
  REGION 1..9: note = Description of Artificial Sequence: Synthetic peptide
AIFQHSMTK

SEQ ID NO: 21310 - protein, 9 aa, synthetic construct
  REGION 1..9: note = Description of Artificial Sequence: Synthetic peptide
NYSDTIYKL

SEQ ID NO: 21311 - protein, 9 aa, synthetic construct
  REGION 1..9: note = Description of Artificial Sequence: Synthetic peptide
YETEVHNVW

SEQ ID NO: 21312 - protein, 9 aa, synthetic construct
  REGION 1..9: note = Description of Artificial Sequence: Synthetic peptide
VLENVTENF

SEQ ID NO: 21313 - protein, 9 aa, synthetic construct
  REGION 1..9: note = Description of Artificial Sequence: Synthetic peptide
RYLKDQQLL

SEQ ID NO: 21314 - protein, 9 aa, synthetic construct
  REGION 1..9: note = Description of Artificial Sequence: Synthetic peptide
FYKLDIVQI

SEQ ID NO: 21315 - protein, 9 aa, synthetic construct
  REGION 1..9: note = Description of Artificial Sequence: Synthetic peptide
RYLRDQQLL

SEQ ID NO: 21316 - protein, 9 aa, synthetic construct
  REGION 1..9: note = Description of Artificial Sequence: Synthetic peptide
IYQEPYKNL

SEQ ID NO: 21317 - protein, 9 aa, synthetic construct
  REGION 1..9: note = Description of Artificial Sequence: Synthetic peptide
KYLWNLVQY

SEQ ID NO: 21318 - protein, 9 aa, synthetic construct
  REGION 1..9: note = Description of Artificial Sequence: Synthetic peptide
NYSDTIYKL

SEQ ID NO: 21319 - protein, 9 aa, synthetic construct
  REGION 1..9: note = Description of Artificial Sequence: Synthetic peptide
FYKLDIVQI

SEQ ID NO: 21320 - protein, 9 aa, synthetic construct
  REGION 1..9: note = Description of Artificial Sequence: Synthetic peptide
RYLKDQQLL

SEQ ID NO: 21321 - protein, 9 aa, synthetic construct
  REGION 1..9: note = Description of Artificial Sequence: Synthetic peptide
IYQEPYKNL

SEQ ID NO: 21322 - protein, 9 aa, synthetic construct
  REGION 1..9: note = Description of Artificial Sequence: Synthetic peptide
RYLRDQQLL

SEQ ID NO: 21323 - protein, 9 aa, synthetic construct
  REGION 1..9: note = Description of Artificial Sequence: Synthetic peptide
YYDPSKDLI

SEQ ID NO: 21324 - protein, 10 aa, synthetic construct
  REGION 1..10: note = Description of Artificial Sequence: Synthetic peptide
DTINEEAAEW

SEQ ID NO: 21325 - protein, 10 aa, synthetic construct
  REGION 1..10: note = Description of Artificial Sequence: Synthetic peptide
DTINDEAAEW

SEQ ID NO: 21326 - protein, 9 aa, synthetic construct
  REGION 1..9: note = Description of Artificial Sequence: Synthetic peptide
EVIPMFSAL

SEQ ID NO: 21327 - protein, 9 aa, synthetic construct
  REGION 1..9: note = Description of Artificial Sequence: Synthetic peptide
EVIPMFTAL

SEQ ID NO: 21328 - protein, 10 aa, synthetic construct
  REGION 1..10: note = Description of Artificial Sequence: Synthetic peptide
EISNHTSTIY

SEQ ID NO: 21329 - protein, 9 aa, synthetic construct
  REGION 1..9: note = Description of Artificial Sequence: Synthetic peptide
DIAGTTSTL

SEQ ID NO: 21330 - protein, 9 aa, synthetic construct
  REGION 1..9: note = Description of Artificial Sequence: Synthetic peptide
EQSPPLTSL

SEQ ID NO: 21331 - protein, 9 aa, synthetic construct
  REGION 1..9: note = Description of Artificial Sequence: Synthetic peptide
NVTENFNMW

SEQ ID NO: 21332 - protein, 10 aa, synthetic construct
  REGION 1..10: note = Description of Artificial Sequence: Synthetic peptide
EIQKQGHGQW

SEQ ID NO: 21333 - protein, 10 aa, synthetic construct
  REGION 1..10: note = Description of Artificial Sequence: Synthetic peptide
EVNIVTDSQY

SEQ ID NO: 21334 - protein, 9 aa, synthetic construct
  REGION 1..9: note = Description of Artificial Sequence: Synthetic peptide
ETKQGKAGY

SEQ ID NO: 21335 - protein, 10 aa, synthetic construct
  REGION 1..10: note = Description of Artificial Sequence: Synthetic peptide
EVNIVTDSQY

SEQ ID NO: 21336 - protein, 9 aa, synthetic construct
  REGION 1..9: note = Description of Artificial Sequence: Synthetic peptide
EVIPMFSAL

SEQ ID NO: 21337 - protein, 11 aa, synthetic construct
  REGION 1..11: note = Description of Artificial Sequence: Synthetic peptide
EAADKGVSQNY

SEQ ID NO: 21338 - protein, 9 aa, synthetic construct
  REGION 1..9: note = Description of Artificial Sequence: Synthetic peptide
EVIPMFTAL

SEQ ID NO: 21339 - protein, 9 aa, synthetic construct
  REGION 1..9: note = Description of Artificial Sequence: Synthetic peptide
ETPGIRYQY

SEQ ID NO: 21340 - protein, 9 aa, synthetic construct
  REGION 1..9: note = Description of Artificial Sequence: Synthetic peptide
ETPGVRYQY

SEQ ID NO: 21341 - protein, 10 aa, synthetic construct
  REGION 1..10: note = Description of Artificial Sequence: Synthetic peptide
EVIPAETGQE

SEQ ID NO: 21342 - protein, 10 aa, synthetic construct
  REGION 1..10: note = Description of Artificial Sequence: Synthetic peptide
EISNHTSTIY

SEQ ID NO: 21343 - protein, 9 aa, synthetic construct
  REGION 1..9: note = Description of Artificial Sequence: Synthetic peptide
DIIGDIRQA

SEQ ID NO: 21344 - protein, 10 aa, synthetic construct
  REGION 1..10: note = Description of Artificial Sequence: Synthetic peptide
ETFRPGGGDM

SEQ ID NO: 21345 - protein, 9 aa, synthetic construct
  REGION 1..9: note = Description of Artificial Sequence: Synthetic peptide
EVIPAETGQ

SEQ ID NO: 21346 - protein, 9 aa, synthetic construct
  REGION 1..9: note = Description of Artificial Sequence: Synthetic peptide
ETKKGRAGY

SEQ ID NO: 21347 - protein, 9 aa, synthetic construct
  REGION 1..9: note = Description of Artificial Sequence: Synthetic peptide
EVIPMFSAL

SEQ ID NO: 21348 - protein, 9 aa, synthetic construct
  REGION 1..9: note = Description of Artificial Sequence: Synthetic peptide
EVIPMFTAL

SEQ ID NO: 21349 - protein, 10 aa, synthetic construct
  REGION 1..10: note = Description of Artificial Sequence: Synthetic peptide
EVNIVTDSQY

SEQ ID NO: 21350 - protein, 9 aa, synthetic construct
  REGION 1..9: note = Description of Artificial Sequence: Synthetic peptide
DIAGTTSTL

SEQ ID NO: 21351 - protein, 9 aa, synthetic construct
  REGION 1..9: note = Description of Artificial Sequence: Synthetic peptide
EQSPPLTSL

SEQ ID NO: 21352 - protein, 10 aa, synthetic construct
  REGION 1..10: note = Description of Artificial Sequence: Synthetic peptide
EISNHTSTIY

SEQ ID NO: 21353 - protein, 11 aa, synthetic construct
  REGION 1..11: note = Description of Artificial Sequence: Synthetic peptide
EAADKGVSQNY

SEQ ID NO: 21354 - protein, 9 aa, synthetic construct
  REGION 1..9: note = Description of Artificial Sequence: Synthetic peptide
EVIPMFTAL

SEQ ID NO: 21355 - protein, 9 aa, synthetic construct
  REGION 1..9: note = Description of Artificial Sequence: Synthetic peptide
EVIPMFSAL

SEQ ID NO: 21356 - protein, 9 aa, synthetic construct
  REGION 1..9: note = Description of Artificial Sequence: Synthetic peptide
DIIGDIRQA

SEQ ID NO: 21357 - protein, 9 aa, synthetic construct
  REGION 1..9: note = Description of Artificial Sequence: Synthetic peptide
ETVQINCTR

SEQ ID NO: 21358 - protein, 9 aa, synthetic construct
  REGION 1..9: note = Description of Artificial Sequence: Synthetic peptide
EAVEINCTR

SEQ ID NO: 21359 - protein, 9 aa, synthetic construct
  REGION 1..9: note = Description of Artificial Sequence: Synthetic peptide
DIAGTTSTL

SEQ ID NO: 21360 - protein, 9 aa, synthetic construct
  REGION 1..9: note = Description of Artificial Sequence: Synthetic peptide
MVHQALSPR

SEQ ID NO: 21361 - protein, 9 aa, synthetic construct
  REGION 1..9: note = Description of Artificial Sequence: Synthetic peptide
LFNTVATLY

SEQ ID NO: 21362 - protein, 9 aa, synthetic construct
  REGION 1..9: note = Description of Artificial Sequence: Synthetic peptide
TVLDVGDAY

SEQ ID NO: 21363 - protein, 10 aa, synthetic construct
  REGION 1..10: note = Description of Artificial Sequence: Synthetic peptide
VTFEPIPIHY

SEQ ID NO: 21364 - protein, 9 aa, synthetic construct
  REGION 1..9: note = Description of Artificial Sequence: Synthetic peptide
LYNTIAVLY

SEQ ID NO: 21365 - protein, 9 aa, synthetic construct
  REGION 1..9: note = Description of Artificial Sequence: Synthetic peptide
SFEPIPIHY

SEQ ID NO: 21366 - protein, 9 aa, synthetic construct
  REGION 1..9: note = Description of Artificial Sequence: Synthetic peptide
TFEPIPIHY

SEQ ID NO: 21367 - protein, 9 aa, synthetic construct
  REGION 1..9: note = Description of Artificial Sequence: Synthetic peptide
LFNTVATLY

SEQ ID NO: 21368 - protein, 9 aa, synthetic construct
  REGION 1..9: note = Description of Artificial Sequence: Synthetic peptide
GFFPDWQNY

SEQ ID NO: 21369 - protein, 9 aa, synthetic construct
  REGION 1..9: note = Description of Artificial Sequence: Synthetic peptide
SFEPIPIHY

SEQ ID NO: 21370 - protein, 10 aa, synthetic construct
  REGION 1..10: note = Description of Artificial Sequence: Synthetic peptide
VTFEPIPIHY

SEQ ID NO: 21371 - protein, 9 aa, synthetic construct
  REGION 1..9: note = Description of Artificial Sequence: Synthetic peptide
LYNTIAVLY

SEQ ID NO: 21372 - protein, 9 aa, synthetic construct
  REGION 1..9: note = Description of Artificial Sequence: Synthetic peptide
TFEPIPIHY

SEQ ID NO: 21373 - protein, 9 aa, synthetic construct
  REGION 1..9: note = Description of Artificial Sequence: Synthetic peptide
NNLWVTVYY

SEQ ID NO: 21374 - protein, 9 aa, synthetic construct
  REGION 1..9: note = Description of Artificial Sequence: Synthetic peptide
HMGPGKAFY

SEQ ID NO: 21375 - protein, 9 aa, synthetic construct
  REGION 1..9: note = Description of Artificial Sequence: Synthetic peptide
VWTIVYIEY

SEQ ID NO: 21376 - protein, 9 aa, synthetic construct
  REGION 1..9: note = Description of Artificial Sequence: Synthetic peptide
TVLDVGDAY

SEQ ID NO: 21377 - protein, 9 aa, synthetic construct
  REGION 1..9: note = Description of Artificial Sequence: Synthetic peptide
KTKPPVPSV

SEQ ID NO: 21378 - protein, 10 aa, synthetic construct
  REGION 1..10: note = Description of Artificial Sequence: Synthetic peptide
QEQGPPLTSL

SEQ ID NO: 21379 - protein, 9 aa, synthetic construct
  REGION 1..9: note = Description of Artificial Sequence: Synthetic peptide
YESNPYPNL

SEQ ID NO: 21380 - protein, 10 aa, synthetic construct
  REGION 1..10: note = Description of Artificial Sequence: Synthetic peptide
KEQSPPLTSL

SEQ ID NO: 21381 - protein, 9 aa, synthetic construct
  REGION 1..9: note = Description of Artificial Sequence: Synthetic peptide
TEVVQKVAM

SEQ ID NO: 21382 - protein, 9 aa, synthetic construct
  REGION 1..9: note = Description of Artificial Sequence: Synthetic peptide
YETEVHNVW

SEQ ID NO: 21383 - protein, 10 aa, synthetic construct
  REGION 1..10: note = Description of Artificial Sequence: Synthetic peptide
NERSGTGSSF

SEQ ID NO: 21384 - protein, 9 aa, synthetic construct
  REGION 1..9: note = Description of Artificial Sequence: Synthetic peptide
ISNHTSTIY

SEQ ID NO: 21385 - protein, 11 aa, synthetic construct
  REGION 1..11: note = Description of Artificial Sequence: Synthetic peptide
QTGSEEIKSLY

SEQ ID NO: 21386 - protein, 9 aa, synthetic construct
  REGION 1..9: note = Description of Artificial Sequence: Synthetic peptide
TVLDVGDAY

SEQ ID NO: 21387 - protein, 9 aa, synthetic construct
  REGION 1..9: note = Description of Artificial Sequence: Synthetic peptide
LGQHIYTTY

SEQ ID NO: 21388 - protein, 10 aa, synthetic construct
  REGION 1..10: note = Description of Artificial Sequence: Synthetic peptide
ILKEPVHGVY

SEQ ID NO: 21389 - protein, 9 aa, synthetic construct
  REGION 1..9: note = Description of Artificial Sequence: Synthetic peptide
KAQEEHEKY

SEQ ID NO: 21390 - protein, 10 aa, synthetic construct
  REGION 1..10: note = Description of Artificial Sequence: Synthetic peptide
GLADQLIHIY

SEQ ID NO: 21391 - protein, 11 aa, synthetic construct
  REGION 1..11: note = Description of Artificial Sequence: Synthetic peptide
QTGSEEIKSLY

SEQ ID NO: 21392 - protein, 9 aa, synthetic construct
  REGION 1..9: note = Description of Artificial Sequence: Synthetic peptide
KQILNIQKF

SEQ ID NO: 21393 - protein, 9 aa, synthetic construct
  REGION 1..9: note = Description of Artificial Sequence: Synthetic peptide
VVNRVRQGY

SEQ ID NO: 21394 - protein, 11 aa, synthetic construct
  REGION 1..11: note = Description of Artificial Sequence: Synthetic peptide
RQKQISSISER

SEQ ID NO: 21395 - protein, 10 aa, synthetic construct
  REGION 1..10: note = Description of Artificial Sequence: Synthetic peptide
VTNSAVMMQR

SEQ ID NO: 21396 - protein, 9 aa, synthetic construct
  REGION 1..9: note = Description of Artificial Sequence: Synthetic peptide
TVKVGGQLR

SEQ ID NO: 21397 - protein, 9 aa, synthetic construct
  REGION 1..9: note = Description of Artificial Sequence: Synthetic peptide
RQIREISQR

SEQ ID NO: 21398 - protein, 9 aa, synthetic construct
  REGION 1..9: note = Description of Artificial Sequence: Synthetic peptide
RARVLAVER

SEQ ID NO: 21399 - protein, 11 aa, synthetic construct
  REGION 1..11: note = Description of Artificial Sequence: Synthetic peptide
TVNDIQKLVGK

SEQ ID NO: 21400 - protein, 9 aa, synthetic construct
  REGION 1..9: note = Description of Artificial Sequence: Synthetic peptide
KQISSISER

SEQ ID NO: 21401 - protein, 11 aa, synthetic construct
  REGION 1..11: note = Description of Artificial Sequence: Synthetic peptide
KGRPGNFLQSR

SEQ ID NO: 21402 - protein, 11 aa, synthetic construct
  REGION 1..11: note = Description of Artificial Sequence: Synthetic peptide
QVTNSAVMMQR

SEQ ID NO: 21403 - protein, 8 aa, synthetic construct
  REGION 1..8: note = Description of Artificial Sequence: Synthetic peptide
QTLIPTSR

SEQ ID NO: 21404 - protein, 9 aa, synthetic construct
  REGION 1..9: note = Description of Artificial Sequence: Synthetic peptide
TVWGIKQLR

SEQ ID NO: 21405 - protein, 9 aa, synthetic construct
  REGION 1..9: note = Description of Artificial Sequence: Synthetic peptide
RARILAVER

SEQ ID NO: 21406 - protein, 9 aa, synthetic construct
  REGION 1..9: note = Description of Artificial Sequence: Synthetic peptide
VGWPAIRER

SEQ ID NO: 21407 - protein, 11 aa, synthetic construct
  REGION 1..11: note = Description of Artificial Sequence: Synthetic peptide
VGPTPVNIIGR

SEQ ID NO: 21408 - protein, 9 aa, synthetic construct
  REGION 1..9: note = Description of Artificial Sequence: Synthetic peptide
VVNRVRQGY

SEQ ID NO: 21409 - protein, 10 aa, synthetic construct
  REGION 1..10: note = Description of Artificial Sequence: Synthetic peptide
SVVNRVRQGY

SEQ ID NO: 21410 - protein, 11 aa, synthetic construct
  REGION 1..11: note = Description of Artificial Sequence: Synthetic peptide
ETFYVDGAAHR

SEQ ID NO: 21411 - protein, 11 aa, synthetic construct
  REGION 1..11: note = Description of Artificial Sequence: Synthetic peptide
ETFYVDGAANR

SEQ ID NO: 21412 - protein, 11 aa, synthetic construct
  REGION 1..11: note = Description of Artificial Sequence: Synthetic peptide
EAREFSSEQTR

SEQ ID NO: 21413 - protein, 11 aa, synthetic construct
  REGION 1..11: note = Description of Artificial Sequence: Synthetic peptide
DNNTRTEETFR

SEQ ID NO: 21414 - protein, 10 aa, synthetic construct
  REGION 1..10: note = Description of Artificial Sequence: Synthetic peptide
DNSEIKVVPR

SEQ ID NO: 21415 - protein, 9 aa, synthetic construct
  REGION 1..9: note = Description of Artificial Sequence: Synthetic peptide
EAVEINCTR

SEQ ID NO: 21416 - protein, 11 aa, synthetic construct
  REGION 1..11: note = Description of Artificial Sequence: Synthetic peptide
DVKQLTEAVQK

SEQ ID NO: 21417 - protein, 9 aa, synthetic construct
  REGION 1..9: note = Description of Artificial Sequence: Synthetic peptide
ETVQINCTR

SEQ ID NO: 21418 - protein, 9 aa, synthetic construct
  REGION 1..9: note = Description of Artificial Sequence: Synthetic peptide
TNSAVMMQR

SEQ ID NO: 21419 - protein, 10 aa, synthetic construct
  REGION 1..10: note = Description of Artificial Sequence: Synthetic peptide
VTNSAVMMQR

SEQ ID NO: 21420 - protein, 11 aa, synthetic construct
  REGION 1..11: note = Description of Artificial Sequence: Synthetic peptide
DVKQLTEVVQK

SEQ ID NO: 21421 - protein, 9 aa, synthetic construct
  REGION 1..9: note = Description of Artificial Sequence: Synthetic peptide
SNHTSTIYR

SEQ ID NO: 21422 - protein, 9 aa, synthetic construct
  REGION 1..9: note = Description of Artificial Sequence: Synthetic peptide
DAWEKIRLR

SEQ ID NO: 21423 - protein, 11 aa, synthetic construct
  REGION 1..11: note = Description of Artificial Sequence: Synthetic peptide
EARKFSSEQTR

SEQ ID NO: 21424 - protein, 9 aa, synthetic construct
  REGION 1..9: note = Description of Artificial Sequence: Synthetic peptide
DTTITIPCR

SEQ ID NO: 21425 - protein, 9 aa, synthetic construct
  REGION 1..9: note = Description of Artificial Sequence: Synthetic peptide
NITGMILTR

SEQ ID NO: 21426 - protein, 9 aa, synthetic construct
  REGION 1..9: note = Description of Artificial Sequence: Synthetic peptide
ETVQINCTR

SEQ ID NO: 21427 - protein, 11 aa, synthetic construct
  REGION 1..11: note = Description of Artificial Sequence: Synthetic peptide
ETFYVDGAANR

SEQ ID NO: 21428 - protein, 11 aa, synthetic construct
  REGION 1..11: note = Description of Artificial Sequence: Synthetic peptide
ETFYVDGAAHR

SEQ ID NO: 21429 - protein, 9 aa, synthetic construct
  REGION 1..9: note = Description of Artificial Sequence: Synthetic peptide
EAVEINCTR

SEQ ID NO: 21430 - protein, 11 aa, synthetic construct
  REGION 1..11: note = Description of Artificial Sequence: Synthetic peptide
EAREFSSEQTR

SEQ ID NO: 21431 - protein, 9 aa, synthetic construct
  REGION 1..9: note = Description of Artificial Sequence: Synthetic peptide
TNSAVMMQR

SEQ ID NO: 21432 - protein, 9 aa, synthetic construct
  REGION 1..9: note = Description of Artificial Sequence: Synthetic peptide
SNHTSTIYR

SEQ ID NO: 21433 - protein, 9 aa, synthetic construct
  REGION 1..9: note = Description of Artificial Sequence: Synthetic peptide
FYVDGAANR

SEQ ID NO: 21434 - protein, 9 aa, synthetic construct
  REGION 1..9: note = Description of Artificial Sequence: Synthetic peptide
MVHQALSPR

SEQ ID NO: 21435 - protein, 11 aa, synthetic construct
  REGION 1..11: note = Description of Artificial Sequence: Synthetic peptide
EISNHTSTIYR

SEQ ID NO: 21436 - protein, 11 aa, synthetic construct
  REGION 1..11: note = Description of Artificial Sequence: Synthetic peptide
TVNDIQKLVGK

SEQ ID NO: 21437 - protein, 9 aa, synthetic construct
  REGION 1..9: note = Description of Artificial Sequence: Synthetic peptide
TCTNVTNNR

SEQ ID NO: 21438 - protein, 9 aa, synthetic construct
  REGION 1..9: note = Description of Artificial Sequence: Synthetic peptide
TVKVGGQLR

SEQ ID NO: 21439 - protein, 10 aa, synthetic construct
  REGION 1..10: note = Description of Artificial Sequence: Synthetic peptide
VTNSAVMMQR

SEQ ID NO: 21440 - protein, 11 aa, synthetic construct
  REGION 1..11: note = Description of Artificial Sequence: Synthetic peptide
EARKFSSEQTR

SEQ ID NO: 21441 - protein, 10 aa, synthetic construct
  REGION 1..10: note = Description of Artificial Sequence: Synthetic peptide
DNSEIKVVPR

SEQ ID NO: 21442 - protein, 9 aa, synthetic construct
  REGION 1..9: note = Description of Artificial Sequence: Synthetic peptide
NSEIKVVPR

SEQ ID NO: 21443 - protein, 11 aa, synthetic construct
  REGION 1..11: note = Description of Artificial Sequence: Synthetic peptide
EPLGIAPTRAR

SEQ ID NO: 21444 - protein, 9 aa, synthetic construct
  REGION 1..9: note = Description of Artificial Sequence: Synthetic peptide
FYVDGAAHR

SEQ ID NO: 21445 - protein, 9 aa, synthetic construct
  REGION 1..9: note = Description of Artificial Sequence: Synthetic peptide
MYVSKKANR

SEQ ID NO: 21446 - protein, 8 aa, synthetic construct
  REGION 1..8: note = Description of Artificial Sequence: Synthetic peptide
QTLIPTSR

SEQ ID NO: 21447 - protein, 9 aa, synthetic construct
  REGION 1..9: note = Description of Artificial Sequence: Synthetic peptide
FTVLSVVNR

SEQ ID NO: 21448 - protein, 10 aa, synthetic construct
  REGION 1..10: note = Description of Artificial Sequence: Synthetic peptide
ELKKIIGQVR

SEQ ID NO: 21449 - protein, 11 aa, synthetic construct
  REGION 1..11: note = Description of Artificial Sequence: Synthetic peptide
ETFRPGGGDMR

SEQ ID NO: 21450 - protein, 10 aa, synthetic construct
  REGION 1..10: note = Description of Artificial Sequence: Synthetic peptide
IYQEPHKNLK

SEQ ID NO: 21451 - protein, 9 aa, synthetic construct
  REGION 1..9: note = Description of Artificial Sequence: Synthetic peptide
EYRKVVRQK

SEQ ID NO: 21452 - protein, 8 aa, synthetic construct
  REGION 1..8: note = Description of Artificial Sequence: Synthetic peptide
TVLSVVNR

SEQ ID NO: 21453 - protein, 9 aa, synthetic construct
  REGION 1..9: note = Description of Artificial Sequence: Synthetic peptide
FNLPPIVAK

SEQ ID NO: 21454 - protein, 11 aa, synthetic construct
  REGION 1..11: note = Description of Artificial Sequence: Synthetic peptide
VGSDLEIGQPR

SEQ ID NO: 21455 - protein, 9 aa, synthetic construct
  REGION 1..9: note = Description of Artificial Sequence: Synthetic peptide
NITGMILTR

SEQ ID NO: 21456 - protein, 9 aa, synthetic construct
  REGION 1..9: note = Description of Artificial Sequence: Synthetic peptide
EYRKLVKQK

SEQ ID NO: 21457 - protein, 10 aa, synthetic construct
  REGION 1..10: note = Description of Artificial Sequence: Synthetic peptide
SFQTLIPTSR

SEQ ID NO: 21458 - protein, 11 aa, synthetic construct
  REGION 1..11: note = Description of Artificial Sequence: Synthetic peptide
QVTNSAVMMQR

SEQ ID NO: 21459 - protein, 11 aa, synthetic construct
  REGION 1..11: note = Description of Artificial Sequence: Synthetic peptide
EVLASQQREAR

SEQ ID NO: 21460 - protein, 11 aa, synthetic construct
  REGION 1..11: note = Description of Artificial Sequence: Synthetic peptide
ETFYVDGAANR

SEQ ID NO: 21461 - protein, 11 aa, synthetic construct
  REGION 1..11: note = Description of Artificial Sequence: Synthetic peptide
ETFYVDGAAHR

SEQ ID NO: 21462 - protein, 9 aa, synthetic construct
  REGION 1..9: note = Description of Artificial Sequence: Synthetic peptide
ETVQINCTR

SEQ ID NO: 21463 - protein, 9 aa, synthetic construct
  REGION 1..9: note = Description of Artificial Sequence: Synthetic peptide
EAVEINCTR

SEQ ID NO: 21464 - protein, 9 aa, synthetic construct
  REGION 1..9: note = Description of Artificial Sequence: Synthetic peptide
TNSAVMMQR

SEQ ID NO: 21465 - protein, 10 aa, synthetic construct
  REGION 1..10: note = Description of Artificial Sequence: Synthetic peptide
TTGDIIGDIR

SEQ ID NO: 21466 - protein, 11 aa, synthetic construct
  REGION 1..11: note = Description of Artificial Sequence: Synthetic peptide
EISNHTSTIYR

SEQ ID NO: 21467 - protein, 11 aa, synthetic construct
  REGION 1..11: note = Description of Artificial Sequence: Synthetic peptide
QVTNSAVMMQR

SEQ ID NO: 21468 - protein, 11 aa, synthetic construct
  REGION 1..11: note = Description of Artificial Sequence: Synthetic peptide
TVNDIQKLVGK

SEQ ID NO: 21469 - protein, 11 aa, synthetic construct
  REGION 1..11: note = Description of Artificial Sequence: Synthetic peptide
ETFRPGGGDMR

SEQ ID NO: 21470 - protein, 9 aa, synthetic construct
  REGION 1..9: note = Description of Artificial Sequence: Synthetic peptide
NITGMILTR

SEQ ID NO: 21471 - protein, 9 aa, synthetic construct
  REGION 1..9: note = Description of Artificial Sequence: Synthetic peptide
TCTNVTNNR

SEQ ID NO: 21472 - protein, 10 aa, synthetic construct
  REGION 1..10: note = Description of Artificial Sequence: Synthetic peptide
DNSEIKVVPR

SEQ ID NO: 21473 - protein, 9 aa, synthetic construct
  REGION 1..9: note = Description of Artificial Sequence: Synthetic peptide
FTVLSVVNR

SEQ ID NO: 21474 - protein, 10 aa, synthetic construct
  REGION 1..10: note = Description of Artificial Sequence: Synthetic peptide
VTNSAVMMQR

SEQ ID NO: 21475 - protein, 9 aa, synthetic construct
  REGION 1..9: note = Description of Artificial Sequence: Synthetic peptide
NSEIKVVPR

SEQ ID NO: 21476 - protein, 10 aa, synthetic construct
  REGION 1..10: note = Description of Artificial Sequence: Synthetic peptide
EVNIVTDSQY

SEQ ID NO: 21477 - protein, 10 aa, synthetic construct
  REGION 1..10: note = Description of Artificial Sequence: Synthetic peptide
ASITLTVQAR

SEQ ID NO: 21478 - protein, 9 aa, synthetic construct
  REGION 1..9: note = Description of Artificial Sequence: Synthetic peptide
FAVLSVVNR

SEQ ID NO: 21479 - protein, 11 aa, synthetic construct
  REGION 1..11: note = Description of Artificial Sequence: Synthetic peptide
DVKQLTEAVQK

SEQ ID NO: 21480 - protein, 11 aa, synthetic construct
  REGION 1..11: note = Description of Artificial Sequence: Synthetic peptide
VGSDLEIGQPR

SEQ ID NO: 21481 - protein, 9 aa, synthetic construct
  REGION 1..9: note = Description of Artificial Sequence: Synthetic peptide
PTAGNITCR

SEQ ID NO: 21482 - protein, 10 aa, synthetic construct
  REGION 1..10: note = Description of Artificial Sequence: Synthetic peptide
ATGDIIGDIR

SEQ ID NO: 21483 - protein, 9 aa, synthetic construct
  REGION 1..9: note = Description of Artificial Sequence: Synthetic peptide
EPLGIAPTR

SEQ ID NO: 21484 - protein, 11 aa, synthetic construct
  REGION 1..11: note = Description of Artificial Sequence: Synthetic peptide
TAIAVAGGTDR

SEQ ID NO: 21485 - protein, 11 aa, synthetic construct
  REGION 1..11: note = Description of Artificial Sequence: Synthetic peptide
DVKQLTEVVQK

SEQ ID NO: 21486 - protein, 11 aa, synthetic construct
  REGION 1..11: note = Description of Artificial Sequence: Synthetic peptide
IVFTVLSVVNR

SEQ ID NO: 21487 - protein, 9 aa, synthetic construct
  REGION 1..9: note = Description of Artificial Sequence: Synthetic peptide
DTTITIPCR

SEQ ID NO: 21488 - protein, 10 aa, synthetic construct
  REGION 1..10: note = Description of Artificial Sequence: Synthetic peptide
DIIATDIQTK

SEQ ID NO: 21489 - protein, 11 aa, synthetic construct
  REGION 1..11: note = Description of Artificial Sequence: Synthetic peptide
TAIAVAEGTDR

SEQ ID NO: 21490 - protein, 11 aa, synthetic construct
  REGION 1..11: note = Description of Artificial Sequence: Synthetic peptide
VGPTPVNIIGR

SEQ ID NO: 21491 - protein, 9 aa, synthetic construct
  REGION 1..9: note = Description of Artificial Sequence: Synthetic peptide
SRIGIIPQR

SEQ ID NO: 21492 - protein, 11 aa, synthetic construct
  REGION 1..11: note = Description of Artificial Sequence: Synthetic peptide
IAFAVLSVVNR

SEQ ID NO: 21493 - protein, 9 aa, synthetic construct
  REGION 1..9: note = Description of Artificial Sequence: Synthetic peptide
ETAYFILKL

SEQ ID NO: 21494 - protein, 9 aa, synthetic construct
  REGION 1..9: note = Description of Artificial Sequence: Synthetic peptide
QLTEVVQKV

SEQ ID NO: 21495 - protein, 9 aa, synthetic construct
  REGION 1..9: note = Description of Artificial Sequence: Synthetic peptide
NTSTITQTC

SEQ ID NO: 21496 - protein, 9 aa, synthetic construct
  REGION 1..9: note = Description of Artificial Sequence: Synthetic peptide
TVLSVVNRV

SEQ ID NO: 21497 - protein, 9 aa, synthetic construct
  REGION 1..9: note = Description of Artificial Sequence: Synthetic peptide
NTIAVLYFV

SEQ ID NO: 21498 - protein, 9 aa, synthetic construct
  REGION 1..9: note = Description of Artificial Sequence: Synthetic peptide
NTKNIIVQL

SEQ ID NO: 21499 - protein, 9 aa, synthetic construct
  REGION 1..9: note = Description of Artificial Sequence: Synthetic peptide
EVIPMFTAL

SEQ ID NO: 21500 - protein, 9 aa, synthetic construct
  REGION 1..9: note = Description of Artificial Sequence: Synthetic peptide
TVNDIQKLV

SEQ ID NO: 21501 - protein, 9 aa, synthetic construct
  REGION 1..9: note = Description of Artificial Sequence: Synthetic peptide
HTSTIYRLI

SEQ ID NO: 21502 - protein, 9 aa, synthetic construct
  REGION 1..9: note = Description of Artificial Sequence: Synthetic peptide
ESFGFGEKI

SEQ ID NO: 21503 - protein, 11 aa, synthetic construct
  REGION 1..11: note = Description of Artificial Sequence: Synthetic peptide
ETFYVDGAAHR

SEQ ID NO: 21504 - protein, 9 aa, synthetic construct
  REGION 1..9: note = Description of Artificial Sequence: Synthetic peptide
FTSAVVKAA

SEQ ID NO: 21505 - protein, 9 aa, synthetic construct
  REGION 1..9: note = Description of Artificial Sequence: Synthetic peptide
TTITIPCRI

SEQ ID NO: 21506 - protein, 9 aa, synthetic construct
  REGION 1..9: note = Description of Artificial Sequence: Synthetic peptide
ETVQINCTR

SEQ ID NO: 21507 - protein, 9 aa, synthetic construct
  REGION 1..9: note = Description of Artificial Sequence: Synthetic peptide
EISNHTSTI

SEQ ID NO: 21508 - protein, 9 aa, synthetic construct
  REGION 1..9: note = Description of Artificial Sequence: Synthetic peptide
LTVGIIALV

SEQ ID NO: 21509 - protein, 9 aa, synthetic construct
  REGION 1..9: note = Description of Artificial Sequence: Synthetic peptide
WTIEILEEL

SEQ ID NO: 21510 - protein, 9 aa, synthetic construct
  REGION 1..9: note = Description of Artificial Sequence: Synthetic peptide
YTAFTIPSI

SEQ ID NO: 21511 - protein, 9 aa, synthetic construct
  REGION 1..9: note = Description of Artificial Sequence: Synthetic peptide
ETTNQKAEL

SEQ ID NO: 21512 - protein, 9 aa, synthetic construct
  REGION 1..9: note = Description of Artificial Sequence: Synthetic peptide
FTSTVVKAA

SEQ ID NO: 21513 - protein, 9 aa, synthetic construct
  REGION 1..9: note = Description of Artificial Sequence: Synthetic peptide
GAASITLTV

SEQ ID NO: 21514 - protein, 9 aa, synthetic construct
  REGION 1..9: note = Description of Artificial Sequence: Synthetic peptide
TTSTLQEQI

SEQ ID NO: 21515 - protein, 9 aa, synthetic construct
  REGION 1..9: note = Description of Artificial Sequence: Synthetic peptide
NTSTVTQAC

SEQ ID NO: 21516 - protein, 9 aa, synthetic construct
  REGION 1..9: note = Description of Artificial Sequence: Synthetic peptide
MTSNPPVPV

SEQ ID NO: 21517 - protein, 9 aa, synthetic construct
  REGION 1..9: note = Description of Artificial Sequence: Synthetic peptide
EVIPMFSAL

SEQ ID NO: 21518 - protein, 11 aa, synthetic construct
  REGION 1..11: note = Description of Artificial Sequence: Synthetic peptide
ETFYVDGAANR

SEQ ID NO: 21519 - protein, 9 aa, synthetic construct
  REGION 1..9: note = Description of Artificial Sequence: Synthetic peptide
DVKQLTEAV

SEQ ID NO: 21520 - protein, 9 aa, synthetic construct
  REGION 1..9: note = Description of Artificial Sequence: Synthetic peptide
LVNQIIEQL

SEQ ID NO: 21521 - protein, 9 aa, synthetic construct
  REGION 1..9: note = Description of Artificial Sequence: Synthetic peptide
ESFGFGEEI

SEQ ID NO: 21522 - protein, 9 aa, synthetic construct
  REGION 1..9: note = Description of Artificial Sequence: Synthetic peptide
MTSNPPIPV

SEQ ID NO: 21523 - protein, 9 aa, synthetic construct
  REGION 1..9: note = Description of Artificial Sequence: Synthetic peptide
QNYPIVQNL

SEQ ID NO: 21524 - protein, 9 aa, synthetic construct
  REGION 1..9: note = Description of Artificial Sequence: Synthetic peptide
RPKPPVPSV

SEQ ID NO: 21525 - protein, 9 aa, synthetic construct
  REGION 1..9: note = Description of Artificial Sequence: Synthetic peptide
SPAIFQHSM

SEQ ID NO: 21526 - protein, 10 aa, synthetic construct
  REGION 1..10: note = Description of Artificial Sequence: Synthetic peptide
SPAEIKNCSF

SEQ ID NO: 21527 - protein, 9 aa, synthetic construct
  REGION 1..9: note = Description of Artificial Sequence: Synthetic peptide
SPTSRELRV

SEQ ID NO: 21528 - protein, 9 aa, synthetic construct
  REGION 1..9: note = Description of Artificial Sequence: Synthetic peptide
QVRDTKEAL

SEQ ID NO: 21529 - protein, 9 aa, synthetic construct
  REGION 1..9: note = Description of Artificial Sequence: Synthetic peptide
QPRTKIEEL

SEQ ID NO: 21530 - protein, 10 aa, synthetic construct
  REGION 1..10: note = Description of Artificial Sequence: Synthetic peptide
RPNNNTRKSI

SEQ ID NO: 21531 - protein, 8 aa, synthetic construct
  REGION 1..8: note = Description of Artificial Sequence: Synthetic peptide
KPVVSTQL

SEQ ID NO: 21532 - protein, 10 aa, synthetic construct
  REGION 1..10: note = Description of Artificial Sequence: Synthetic peptide
SPIETVPVKL

SEQ ID NO: 21533 - protein, 10 aa, synthetic construct
  REGION 1..10: note = Description of Artificial Sequence: Synthetic peptide
RPSNNTRKSI

SEQ ID NO: 21534 - protein, 9 aa, synthetic construct
  REGION 1..9: note = Description of Artificial Sequence: Synthetic peptide
IPVEPDTVL

SEQ ID NO: 21535 - protein, 8 aa, synthetic construct
  REGION 1..8: note = Description of Artificial Sequence: Synthetic peptide
TPSLRQEM

SEQ ID NO: 21536 - protein, 10 aa, synthetic construct
  REGION 1..10: note = Description of Artificial Sequence: Synthetic peptide
KEQSPPLTSL

SEQ ID NO: 21537 - protein, 9 aa, synthetic construct
  REGION 1..9: note = Description of Artificial Sequence: Synthetic peptide
SPAIFQCSM

SEQ ID NO: 21538 - protein, 10 aa, synthetic construct
  REGION 1..10: note = Description of Artificial Sequence: Synthetic peptide
SPPLTSLKSL

SEQ ID NO: 21539 - protein, 10 aa, synthetic construct
  REGION 1..10: note = Description of Artificial Sequence: Synthetic peptide
QEQGPPLTSL

SEQ ID NO: 21540 - protein, 9 aa, synthetic construct
  REGION 1..9: note = Description of Artificial Sequence: Synthetic peptide
TPQDLNTML

SEQ ID NO: 21541 - protein, 8 aa, synthetic construct
  REGION 1..8: note = Description of Artificial Sequence: Synthetic peptide
EVVQKVAM

SEQ ID NO: 21542 - protein, 8 aa, synthetic construct
  REGION 1..8: note = Description of Artificial Sequence: Synthetic peptide
DPLRKQPL

SEQ ID NO: 21543 - protein, 9 aa, synthetic construct
  REGION 1..9: note = Description of Artificial Sequence: Synthetic peptide
ELKNSAISL

SEQ ID NO: 21544 - protein, 9 aa, synthetic construct
  REGION 1..9: note = Description of Artificial Sequence: Synthetic peptide
YPGIKVKQL

SEQ ID NO: 21545 - protein, 8 aa, synthetic construct
  REGION 1..8: note = Description of Artificial Sequence: Synthetic peptide
DPIPKQPL

SEQ ID NO: 21546 - protein, 9 aa, synthetic construct
  REGION 1..9: note = Description of Artificial Sequence: Synthetic peptide
DVKQLTEAV

SEQ ID NO: 21547 - protein, 9 aa, synthetic construct
  REGION 1..9: note = Description of Artificial Sequence: Synthetic peptide
SISERLLSA

SEQ ID NO: 21548 - protein, 8 aa, synthetic construct
  REGION 1..8: note = Description of Artificial Sequence: Synthetic peptide
TTNQKTEL

SEQ ID NO: 21549 - protein, 8 aa, synthetic construct
  REGION 1..8: note = Description of Artificial Sequence: Synthetic peptide
HLKTAVQM

SEQ ID NO: 21550 - protein, 11 aa, synthetic construct
  REGION 1..11: note = Description of Artificial Sequence: Synthetic peptide
TQVDPGLADQL

SEQ ID NO: 21551 - protein, 11 aa, synthetic construct
  REGION 1..11: note = Description of Artificial Sequence: Synthetic peptide
TQVEPDLADQL

SEQ ID NO: 21552 - protein, 10 aa, synthetic construct
  REGION 1..10: note = Description of Artificial Sequence: Synthetic peptide
GQVRDQAEHL

SEQ ID NO: 21553 - protein, 9 aa, synthetic construct
  REGION 1..9: note = Description of Artificial Sequence: Synthetic peptide
IQKQGNDQW

SEQ ID NO: 21554 - protein, 9 aa, synthetic construct
  REGION 1..9: note = Description of Artificial Sequence: Synthetic peptide
AQEEEEVGF

SEQ ID NO: 21555 - protein, 9 aa, synthetic construct
  REGION 1..9: note = Description of Artificial Sequence: Synthetic peptide
IQLPDKDSW

SEQ ID NO: 21556 - protein, 10 aa, synthetic construct
  REGION 1..10: note = Description of Artificial Sequence: Synthetic peptide
IQVRDTKEAL

SEQ ID NO: 21557 - protein, 10 aa, synthetic construct
  REGION 1..10: note = Description of Artificial Sequence: Synthetic peptide
KQLTEAVQKI

SEQ ID NO: 21558 - protein, 9 aa, synthetic construct
  REGION 1..9: note = Description of Artificial Sequence: Synthetic peptide
QLTEVVQKV

SEQ ID NO: 21559 - protein, 9 aa, synthetic construct
  REGION 1..9: note = Description of Artificial Sequence: Synthetic peptide
GAASITLTV

SEQ ID NO: 21560 - protein, 9 aa, synthetic construct
  REGION 1..9: note = Description of Artificial Sequence: Synthetic peptide
QLTEAVQKI

SEQ ID NO: 21561 - protein, 9 aa, synthetic construct
  REGION 1..9: note = Description of Artificial Sequence: Synthetic peptide
SQIYPGIKV

SEQ ID NO: 21562 - protein, 9 aa, synthetic construct
  REGION 1..9: note = Description of Artificial Sequence: Synthetic peptide
QQHLLQLTV

SEQ ID NO: 21563 - protein, 8 aa, synthetic construct
  REGION 1..8: note = Description of Artificial Sequence: Synthetic peptide
SQVTNPVV

SEQ ID NO: 21564 - protein, 9 aa, synthetic construct
  REGION 1..9: note = Description of Artificial Sequence: Synthetic peptide
QQQMLQLTV

SEQ ID NO: 21565 - protein, 9 aa, synthetic construct
  REGION 1..9: note = Description of Artificial Sequence: Synthetic peptide
GQVDCSPGI

SEQ ID NO: 21566 - protein, 9 aa, synthetic construct
  REGION 1..9: note = Description of Artificial Sequence: Synthetic peptide
IITQIQPSI

SEQ ID NO: 21567 - protein, 9 aa, synthetic construct
  REGION 1..9: note = Description of Artificial Sequence: Synthetic peptide
SQIFPGIKV

SEQ ID NO: 21568 - protein, 9 aa, synthetic construct
  REGION 1..9: note = Description of Artificial Sequence: Synthetic peptide
AVLSVVNRV

SEQ ID NO: 21569 - protein, 8 aa, synthetic construct
  REGION 1..8: note = Description of Artificial Sequence: Synthetic peptide
VQIEPLGI

SEQ ID NO: 21570 - protein, 10 aa, synthetic construct
  REGION 1..10: note = Description of Artificial Sequence: Synthetic peptide
GQWNKTVNQV

SEQ ID NO: 21571 - protein, 9 aa, synthetic construct
  REGION 1..9: note = Description of Artificial Sequence: Synthetic peptide
AISIVALVV

SEQ ID NO: 21572 - protein, 9 aa, synthetic construct
  REGION 1..9: note = Description of Artificial Sequence: Synthetic peptide
VQLNETVQI

SEQ ID NO: 21573 - protein, 8 aa, synthetic construct
  REGION 1..8: note = Description of Artificial Sequence: Synthetic peptide
VQIKQSEI

SEQ ID NO: 21574 - protein, 9 aa, synthetic construct
  REGION 1..9: note = Description of Artificial Sequence: Synthetic peptide
QQLLTPVRI

SEQ ID NO: 21575 - protein, 9 aa, synthetic construct
  REGION 1..9: note = Description of Artificial Sequence: Synthetic peptide
VQKVAMESI

SEQ ID NO: 21576 - protein, 9 aa, synthetic construct
  REGION 1..9: note = Description of Artificial Sequence: Synthetic peptide
TVLSVVNRV

SEQ ID NO: 21577 - protein, 8 aa, synthetic construct
  REGION 1..8: note = Description of Artificial Sequence: Synthetic peptide
GQMVHQAL

SEQ ID NO: 21578 - protein, 9 aa, synthetic construct
  REGION 1..9: note = Description of Artificial Sequence: Synthetic peptide
VLAEAMSQV

SEQ ID NO: 21579 - protein, 9 aa, synthetic construct
  REGION 1..9: note = Description of Artificial Sequence: Synthetic peptide
ILAEAMSQV

SEQ ID NO: 21580 - protein, 9 aa, synthetic construct
  REGION 1..9: note = Description of Artificial Sequence: Synthetic peptide
ALGETGHLI

SEQ ID NO: 21581 - protein, 9 aa, synthetic construct
  REGION 1..9: note = Description of Artificial Sequence: Synthetic peptide
VQKIATEGI

SEQ ID NO: 21582 - protein, 10 aa, synthetic construct
  REGION 1..10: note = Description of Artificial Sequence: Synthetic peptide
KQLTEAVQKI

SEQ ID NO: 21583 - protein, 9 aa, synthetic construct
  REGION 1..9: note = Description of Artificial Sequence: Synthetic peptide
TQVGSLQYL

SEQ ID NO: 21584 - protein, 9 aa, synthetic construct
  REGION 1..9: note = Description of Artificial Sequence: Synthetic peptide
GQKAIGTVL

SEQ ID NO: 21585 - protein, 9 aa, synthetic construct
  REGION 1..9: note = Description of Artificial Sequence: Synthetic peptide
VQLNEAVEI

SEQ ID NO: 21586 - protein, 8 aa, synthetic construct
  REGION 1..8: note = Description of Artificial Sequence: Synthetic peptide
RQKQISSI

SEQ ID NO: 21587 - protein, 8 aa, synthetic construct
  REGION 1..8: note = Description of Artificial Sequence: Synthetic peptide
NQIIEQLI

SEQ ID NO: 21588 - protein, 9 aa, synthetic construct
  REGION 1..9: note = Description of Artificial Sequence: Synthetic peptide
YQLETEPIV

SEQ ID NO: 21589 - protein, 8 aa, synthetic construct
  REGION 1..8: note = Description of Artificial Sequence: Synthetic peptide
GQETAYFI

SEQ ID NO: 21590 - protein, 9 aa, synthetic construct
  REGION 1..9: note = Description of Artificial Sequence: Synthetic peptide
NQKTELQAI

SEQ ID NO: 21591 - protein, 9 aa, synthetic construct
  REGION 1..9: note = Description of Artificial Sequence: Synthetic peptide
GLGSPQISV

SEQ ID NO: 21592 - protein, 10 aa, synthetic construct
  REGION 1..10: note = Description of Artificial Sequence: Synthetic peptide
AQQQMLQLTV

SEQ ID NO: 21593 - protein, 9 aa, synthetic construct
  REGION 1..9: note = Description of Artificial Sequence: Synthetic peptide
NQKAELQAI

SEQ ID NO: 21594 - protein, 9 aa, synthetic construct
  REGION 1..9: note = Description of Artificial Sequence: Synthetic peptide
ERYLRDQQL

SEQ ID NO: 21595 - protein, 8 aa, synthetic construct
  REGION 1..8: note = Description of Artificial Sequence: Synthetic peptide
QRVLSSCL

SEQ ID NO: 21596 - protein, 9 aa, synthetic construct
  REGION 1..9: note = Description of Artificial Sequence: Synthetic peptide
ERYLKDQQL

SEQ ID NO: 21597 - protein, 9 aa, synthetic construct
  REGION 1..9: note = Description of Artificial Sequence: Synthetic peptide
DRVGTQPAA

SEQ ID NO: 21598 - protein, 9 aa, synthetic construct
  REGION 1..9: note = Description of Artificial Sequence: Synthetic peptide
ERFALNPGL

SEQ ID NO: 21599 - protein, 9 aa, synthetic construct
  REGION 1..9: note = Description of Artificial Sequence: Synthetic peptide
ERFALNPNL

SEQ ID NO: 21600 - protein, 9 aa, synthetic construct
  REGION 1..9: note = Description of Artificial Sequence: Synthetic peptide
ERYLRDQQL

SEQ ID NO: 21601 - protein, 8 aa, synthetic construct
  REGION 1..8: note = Description of Artificial Sequence: Synthetic peptide
GQMVHQAL

SEQ ID NO: 21602 - protein, 9 aa, synthetic construct
  REGION 1..9: note = Description of Artificial Sequence: Synthetic peptide
ERYLKDQQL

SEQ ID NO: 21603 - protein, 8 aa, synthetic construct
  REGION 1..8: note = Description of Artificial Sequence: Synthetic peptide
LQAIHLAL

SEQ ID NO: 21604 - protein, 8 aa, synthetic construct
  REGION 1..8: note = Description of Artificial Sequence: Synthetic peptide
QRVLSSCL

SEQ ID NO: 21605 - protein, 8 aa, synthetic construct
  REGION 1..8: note = Description of Artificial Sequence: Synthetic peptide
IQKLVGKL

SEQ ID NO: 21606 - protein, 9 aa, synthetic construct
  REGION 1..9: note = Description of Artificial Sequence: Synthetic peptide
TEVVQKVAM

SEQ ID NO: 21607 - protein, 9 aa, synthetic construct
  REGION 1..9: note = Description of Artificial Sequence: Synthetic peptide
GQKAIGTVL

SEQ ID NO: 21608 - protein, 8 aa, synthetic construct
  REGION 1..8: note = Description of Artificial Sequence: Synthetic peptide
GQHIYTTY

SEQ ID NO: 21609 - protein, 9 aa, synthetic construct
  REGION 1..9: note = Description of Artificial Sequence: Synthetic peptide
AVTSSNTAF

SEQ ID NO: 21610 - protein, 9 aa, synthetic construct
  REGION 1..9: note = Description of Artificial Sequence: Synthetic peptide
SQVTNSAVM

SEQ ID NO: 21611 - protein, 8 aa, synthetic construct
  REGION 1..8: note = Description of Artificial Sequence: Synthetic peptide
GQMVHQAL

SEQ ID NO: 21612 - protein, 9 aa, synthetic construct
  REGION 1..9: note = Description of Artificial Sequence: Synthetic peptide
SQVTNPVVM

SEQ ID NO: 21613 - protein, 9 aa, synthetic construct
  REGION 1..9: note = Description of Artificial Sequence: Synthetic peptide
KQILNIQKF

SEQ ID NO: 21614 - protein, 9 aa, synthetic construct
  REGION 1..9: note = Description of Artificial Sequence: Synthetic peptide
LQKGLGICY

SEQ ID NO: 21615 - protein, 9 aa, synthetic construct
  REGION 1..9: note = Description of Artificial Sequence: Synthetic peptide
TQACPKVSF

SEQ ID NO: 21616 - protein, 9 aa, synthetic construct
  REGION 1..9: note = Description of Artificial Sequence: Synthetic peptide
KQITKIQNF

SEQ ID NO: 21617 - protein, 9 aa, synthetic construct
  REGION 1..9: note = Description of Artificial Sequence: Synthetic peptide
TQIGCTLNF

SEQ ID NO: 21618 - protein, 9 aa, synthetic construct
  REGION 1..9: note = Description of Artificial Sequence: Synthetic peptide
ISNHTSTIY

SEQ ID NO: 21619 - protein, 9 aa, synthetic construct
  REGION 1..9: note = Description of Artificial Sequence: Synthetic peptide
TVLDVGDAY

SEQ ID NO: 21620 - protein, 11 aa, synthetic construct
  REGION 1..11: note = Description of Artificial Sequence: Synthetic peptide
IQKQGNDQWTY

SEQ ID NO: 21621 - protein, 10 aa, synthetic construct
  REGION 1..10: note = Description of Artificial Sequence: Synthetic peptide
ILKEPVHGVY

SEQ ID NO: 21622 - protein, 8 aa, synthetic construct
  REGION 1..8: note = Description of Artificial Sequence: Synthetic peptide
TQVGSLQY

SEQ ID NO: 21623 - protein, 9 aa, synthetic construct
  REGION 1..9: note = Description of Artificial Sequence: Synthetic peptide
ALVEICTEM

SEQ ID NO: 21624 - protein, 8 aa, synthetic construct
  REGION 1..8: note = Description of Artificial Sequence: Synthetic peptide
AVHVASGY

SEQ ID NO: 21625 - protein, 8 aa, synthetic construct
  REGION 1..8: note = Description of Artificial Sequence: Synthetic peptide
AELVVTTY

SEQ ID NO: 21626 - protein, 9 aa, synthetic construct
  REGION 1..9: note = Description of Artificial Sequence: Synthetic peptide
RAIEAQQQM

SEQ ID NO: 21627 - protein, 9 aa, synthetic construct
  REGION 1..9: note = Description of Artificial Sequence: Synthetic peptide
FLGAAGSTM

SEQ ID NO: 21628 - protein, 9 aa, synthetic construct
  REGION 1..9: note = Description of Artificial Sequence: Synthetic peptide
EQSPPLTSL

SEQ ID NO: 21629 - protein, 9 aa, synthetic construct
  REGION 1..9: note = Description of Artificial Sequence: Synthetic peptide
VQKIATEGI

SEQ ID NO: 21630 - protein, 9 aa, synthetic construct
  REGION 1..9: note = Description of Artificial Sequence: Synthetic peptide
WQKVGQAIY

SEQ ID NO: 21631 - protein, 9 aa, synthetic construct
  REGION 1..9: note = Description of Artificial Sequence: Synthetic peptide
VQKVAMESI

SEQ ID NO: 21632 - protein, 9 aa, synthetic construct
  REGION 1..9: note = Description of Artificial Sequence: Synthetic peptide
HTQVGSLQY

SEQ ID NO: 21633 - protein, 8 aa, synthetic construct
  REGION 1..8: note = Description of Artificial Sequence: Synthetic peptide
VQYWSQEL

SEQ ID NO: 21634 - protein, 9 aa, synthetic construct
  REGION 1..9: note = Description of Artificial Sequence: Synthetic peptide
SQRVLSSCL

SEQ ID NO: 21635 - protein, 8 aa, synthetic construct
  REGION 1..8: note = Description of Artificial Sequence: Synthetic peptide
GQHIYNNY

SEQ ID NO: 21636 - protein, 9 aa, synthetic construct
  REGION 1..9: note = Description of Artificial Sequence: Synthetic peptide
TVLDVGDAY

SEQ ID NO: 21637 - protein, 9 aa, synthetic construct
  REGION 1..9: note = Description of Artificial Sequence: Synthetic peptide
FLGAAGSTM

SEQ ID NO: 21638 - protein, 9 aa, synthetic construct
  REGION 1..9: note = Description of Artificial Sequence: Synthetic peptide
SQVTNSAVM

SEQ ID NO: 21639 - protein, 8 aa, synthetic construct
  REGION 1..8: note = Description of Artificial Sequence: Synthetic peptide
DQLIHIYY

SEQ ID NO: 21640 - protein, 9 aa, synthetic construct
  REGION 1..9: note = Description of Artificial Sequence: Synthetic peptide
TQACPKVSF

SEQ ID NO: 21641 - protein, 9 aa, synthetic construct
  REGION 1..9: note = Description of Artificial Sequence: Synthetic peptide
SQVTNPVVM

SEQ ID NO: 21642 - protein, 9 aa, synthetic construct
  REGION 1..9: note = Description of Artificial Sequence: Synthetic peptide
TVGGHQAAM

SEQ ID NO: 21643 - protein, 9 aa, synthetic construct
  REGION 1..9: note = Description of Artificial Sequence: Synthetic peptide
EQSPPLTSL

SEQ ID NO: 21644 - protein, 9 aa, synthetic construct
  REGION 1..9: note = Description of Artificial Sequence: Synthetic peptide
EQGPPLTSL

SEQ ID NO: 21645 - protein, 10 aa, synthetic construct
  REGION 1..10: note = Description of Artificial Sequence: Synthetic peptide
EISNHTSTIY

SEQ ID NO: 21646 - protein, 9 aa, synthetic construct
  REGION 1..9: note = Description of Artificial Sequence: Synthetic peptide
DAELVVTTY

SEQ ID NO: 21647 - protein, 9 aa, synthetic construct
  REGION 1..9: note = Description of Artificial Sequence: Synthetic peptide
SPAIFQHSM

SEQ ID NO: 21648 - protein, 9 aa, synthetic construct
  REGION 1..9: note = Description of Artificial Sequence: Synthetic peptide
HMGPGKAFY

SEQ ID NO: 21649 - protein, 8 aa, synthetic construct
  REGION 1..8: note = Description of Artificial Sequence: Synthetic peptide
TQVGSLQY

SEQ ID NO: 21650 - protein, 10 aa, synthetic construct
  REGION 1..10: note = Description of Artificial Sequence: Synthetic peptide
NLGQHIYTTY

SEQ ID NO: 21651 - protein, 9 aa, synthetic construct
  REGION 1..9: note = Description of Artificial Sequence: Synthetic peptide
FPQGEAREF

SEQ ID NO: 21652 - protein, 9 aa, synthetic construct
  REGION 1..9: note = Description of Artificial Sequence: Synthetic peptide
SAEPVPLQL

SEQ ID NO: 21653 - protein, 9 aa, synthetic construct
  REGION 1..9: note = Description of Artificial Sequence: Synthetic peptide
DIAGTTSTL

SEQ ID NO: 21654 - protein, 9 aa, synthetic construct
  REGION 1..9: note = Description of Artificial Sequence: Synthetic peptide
AVTSSNTAF

SEQ ID NO: 21655 - protein, 8 aa, synthetic construct
  REGION 1..8: note = Description of Artificial Sequence: Synthetic peptide
GQHIYTTY

SEQ ID NO: 21656 - protein, 10 aa, synthetic construct
  REGION 1..10: note = Description of Artificial Sequence: Synthetic peptide
EVNIVTDSQY

SEQ ID NO: 21657 - protein, 8 aa, synthetic construct
  REGION 1..8: note = Description of Artificial Sequence: Synthetic peptide
GQHIYTTY

SEQ ID NO: 21658 - protein, 9 aa, synthetic construct
  REGION 1..9: note = Description of Artificial Sequence: Synthetic peptide
GQKAIGTVL

SEQ ID NO: 21659 - protein, 9 aa, synthetic construct
  REGION 1..9: note = Description of Artificial Sequence: Synthetic peptide
SKIGPENPY

SEQ ID NO: 21660 - protein, 8 aa, synthetic construct
  REGION 1..8: note = Description of Artificial Sequence: Synthetic peptide
GQMVHQAL

SEQ ID NO: 21661 - protein, 9 aa, synthetic construct
  REGION 1..9: note = Description of Artificial Sequence: Synthetic peptide
LQKGLGICY

SEQ ID NO: 21662 - protein, 9 aa, synthetic construct
  REGION 1..9: note = Description of Artificial Sequence: Synthetic peptide
SQVTNPVVM

SEQ ID NO: 21663 - protein, 9 aa, synthetic construct
  REGION 1..9: note = Description of Artificial Sequence: Synthetic peptide
VKVIEEKAF

SEQ ID NO: 21664 - protein, 9 aa, synthetic construct
  REGION 1..9: note = Description of Artificial Sequence: Synthetic peptide
SQVTNSAVM

SEQ ID NO: 21665 - protein, 9 aa, synthetic construct
  REGION 1..9: note = Description of Artificial Sequence: Synthetic peptide
KQILNIQKF

SEQ ID NO: 21666 - protein, 9 aa, synthetic construct
  REGION 1..9: note = Description of Artificial Sequence: Synthetic peptide
IKNPEMVIY

SEQ ID NO: 21667 - protein, 9 aa, synthetic construct
  REGION 1..9: note = Description of Artificial Sequence: Synthetic peptide
KQITKIQNF

SEQ ID NO: 21668 - protein, 9 aa, synthetic construct
  REGION 1..9: note = Description of Artificial Sequence: Synthetic peptide
TQACPKVSF

SEQ ID NO: 21669 - protein, 8 aa, synthetic construct
  REGION 1..8: note = Description of Artificial Sequence: Synthetic peptide
TQVGSLQY

SEQ ID NO: 21670 - protein, 9 aa, synthetic construct
  REGION 1..9: note = Description of Artificial Sequence: Synthetic peptide
IHMGPGKAF

SEQ ID NO: 21671 - protein, 9 aa, synthetic construct
  REGION 1..9: note = Description of Artificial Sequence: Synthetic peptide
EHLKTAVQM

SEQ ID NO: 21672 - protein, 9 aa, synthetic construct
  REGION 1..9: note = Description of Artificial Sequence: Synthetic peptide
IHIGPGRAF

SEQ ID NO: 21673 - protein, 9 aa, synthetic construct
  REGION 1..9: note = Description of Artificial Sequence: Synthetic peptide
SQVTNSAVM

SEQ ID NO: 21674 - protein, 9 aa, synthetic construct
  REGION 1..9: note = Description of Artificial Sequence: Synthetic peptide
EQSPPLTSL

SEQ ID NO: 21675 - protein, 9 aa, synthetic construct
  REGION 1..9: note = Description of Artificial Sequence: Synthetic peptide
THLEGKIIL

SEQ ID NO: 21676 - protein, 8 aa, synthetic construct
  REGION 1..8: note = Description of Artificial Sequence: Synthetic peptide
MHTDIISL

SEQ ID NO: 21677 - protein, 9 aa, synthetic construct
  REGION 1..9: note = Description of Artificial Sequence: Synthetic peptide
HQALSPRTL

SEQ ID NO: 21678 - protein, 9 aa, synthetic construct
  REGION 1..9: note = Description of Artificial Sequence: Synthetic peptide
SQVTNPVVM

SEQ ID NO: 21679 - protein, 9 aa, synthetic construct
  REGION 1..9: note = Description of Artificial Sequence: Synthetic peptide
EQGPPLTSL

SEQ ID NO: 21680 - protein, 9 aa, synthetic construct
  REGION 1..9: note = Description of Artificial Sequence: Synthetic peptide
GHQAAMQML

SEQ ID NO: 21681 - protein, 10 aa, synthetic construct
  REGION 1..10: note = Description of Artificial Sequence: Synthetic peptide
EHFKNGTITF

SEQ ID NO: 21682 - protein, 9 aa, synthetic construct
  REGION 1..9: note = Description of Artificial Sequence: Synthetic peptide
IREISQRVL

SEQ ID NO: 21683 - protein, 9 aa, synthetic construct
  REGION 1..9: note = Description of Artificial Sequence: Synthetic peptide
AHTNDVKQL

SEQ ID NO: 21684 - protein, 9 aa, synthetic construct
  REGION 1..9: note = Description of Artificial Sequence: Synthetic peptide
GQKAIGTVL

SEQ ID NO: 21685 - protein, 9 aa, synthetic construct
  REGION 1..9: note = Description of Artificial Sequence: Synthetic peptide
IHTDNGTNF

SEQ ID NO: 21686 - protein, 9 aa, synthetic construct
  REGION 1..9: note = Description of Artificial Sequence: Synthetic peptide
NHTSTIYRL

SEQ ID NO: 21687 - protein, 9 aa, synthetic construct
  REGION 1..9: note = Description of Artificial Sequence: Synthetic peptide
SQIYPGIKV

SEQ ID NO: 21688 - protein, 8 aa, synthetic construct
  REGION 1..8: note = Description of Artificial Sequence: Synthetic peptide
EHFKNGTI

SEQ ID NO: 21689 - protein, 9 aa, synthetic construct
  REGION 1..9: note = Description of Artificial Sequence: Synthetic peptide
YRTQVEPDL

SEQ ID NO: 21690 - protein, 9 aa, synthetic construct
  REGION 1..9: note = Description of Artificial Sequence: Synthetic peptide
TVLDVGDAY

SEQ ID NO: 21691 - protein, 9 aa, synthetic construct
  REGION 1..9: note = Description of Artificial Sequence: Synthetic peptide
TINDEAAEW

SEQ ID NO: 21692 - protein, 9 aa, synthetic construct
  REGION 1..9: note = Description of Artificial Sequence: Synthetic peptide
TINEEAAEW

SEQ ID NO: 21693 - protein, 8 aa, synthetic construct
  REGION 1..8: note = Description of Artificial Sequence: Synthetic peptide
AELVVTTY

SEQ ID NO: 21694 - protein, 9 aa, synthetic construct
  REGION 1..9: note = Description of Artificial Sequence: Synthetic peptide
TEVVQKVAM

SEQ ID NO: 21695 - protein, 8 aa, synthetic construct
  REGION 1..8: note = Description of Artificial Sequence: Synthetic peptide
DEIKNCSF

SEQ ID NO: 21696 - protein, 8 aa, synthetic construct
  REGION 1..8: note = Description of Artificial Sequence: Synthetic peptide
NETPGVRY

SEQ ID NO: 21697 - protein, 11 aa, synthetic construct
  REGION 1..11: note = Description of Artificial Sequence: Synthetic peptide
SEVNIVTDSQY

SEQ ID NO: 21698 - protein, 8 aa, synthetic construct
  REGION 1..8: note = Description of Artificial Sequence: Synthetic peptide
NETPGIRY

SEQ ID NO: 21699 - protein, 8 aa, synthetic construct
  REGION 1..8: note = Description of Artificial Sequence: Synthetic peptide
DEQLLTTV

SEQ ID NO: 21700 - protein, 8 aa, synthetic construct
  REGION 1..8: note = Description of Artificial Sequence: Synthetic peptide
MENVTENF

SEQ ID NO: 21701 - protein, 8 aa, synthetic construct
  REGION 1..8: note = Description of Artificial Sequence: Synthetic peptide
SEEIKSLY

SEQ ID NO: 21702 - protein, 8 aa, synthetic construct
  REGION 1..8: note = Description of Artificial Sequence: Synthetic peptide
LENVTENF

SEQ ID NO: 21703 - protein, 8 aa, synthetic construct
  REGION 1..8: note = Description of Artificial Sequence: Synthetic peptide
PEMVIYQY

SEQ ID NO: 21704 - protein, 9 aa, synthetic construct
  REGION 1..9: note = Description of Artificial Sequence: Synthetic peptide
YETEVHNVW

SEQ ID NO: 21705 - protein, 8 aa, synthetic construct
  REGION 1..8: note = Description of Artificial Sequence: Synthetic peptide
TELQAIHL

SEQ ID NO: 21706 - protein, 9 aa, synthetic construct
  REGION 1..9: note = Description of Artificial Sequence: Synthetic peptide
ARVLAVERY

SEQ ID NO: 21707 - protein, 10 aa, synthetic construct
  REGION 1..10: note = Description of Artificial Sequence: Synthetic peptide
VRQGYSPLSF

SEQ ID NO: 21708 - protein, 9 aa, synthetic construct
  REGION 1..9: note = Description of Artificial Sequence: Synthetic peptide
ARILAVERY

SEQ ID NO: 21709 - protein, 10 aa, synthetic construct
  REGION 1..10: note = Description of Artificial Sequence: Synthetic peptide
GGLDGLIYSK

SEQ ID NO: 21710 - protein, 11 aa, synthetic construct
  REGION 1..11: note = Description of Artificial Sequence: Synthetic peptide
LIEESQIQQEK

SEQ ID NO: 21711 - protein, 9 aa, synthetic construct
  REGION 1..9: note = Description of Artificial Sequence: Synthetic peptide
QRQGTEPSF

SEQ ID NO: 21712 - protein, 9 aa, synthetic construct
  REGION 1..9: note = Description of Artificial Sequence: Synthetic peptide
YETEVHNVW

SEQ ID NO: 21713 - protein, 10 aa, synthetic construct
  REGION 1..10: note = Description of Artificial Sequence: Synthetic peptide
GHTQVGSLQY

SEQ ID NO: 21714 - protein, 9 aa, synthetic construct
  REGION 1..9: note = Description of Artificial Sequence: Synthetic peptide
GLDGLIYSK

SEQ ID NO: 21715 - protein, 11 aa, synthetic construct
  REGION 1..11: note = Description of Artificial Sequence: Synthetic peptide
TAIAVAEGTDR

SEQ ID NO: 21716 - protein, 9 aa, synthetic construct
  REGION 1..9: note = Description of Artificial Sequence: Synthetic peptide
GRAGYVTDR

SEQ ID NO: 21717 - protein, 9 aa, synthetic construct
  REGION 1..9: note = Description of Artificial Sequence: Synthetic peptide
SRIGIIPQR

SEQ ID NO: 21718 - protein, 9 aa, synthetic construct
  REGION 1..9: note = Description of Artificial Sequence: Synthetic peptide
GRAGYVTDR

SEQ ID NO: 21719 - protein, 9 aa, synthetic construct
  REGION 1..9: note = Description of Artificial Sequence: Synthetic peptide
SRIGILRQR

SEQ ID NO: 21720 - protein, 9 aa, synthetic construct
  REGION 1..9: note = Description of Artificial Sequence: Synthetic peptide
ARVLAVERY

SEQ ID NO: 21721 - protein, 10 aa, synthetic construct
  REGION 1..10: note = Description of Artificial Sequence: Synthetic peptide
KRFNGTGPCK

SEQ ID NO: 21722 - protein, 9 aa, synthetic construct
  REGION 1..9: note = Description of Artificial Sequence: Synthetic peptide
ARILAVERY

SEQ ID NO: 21723 - protein, 9 aa, synthetic construct
  REGION 1..9: note = Description of Artificial Sequence: Synthetic peptide
YRTQVDPGL

SEQ ID NO: 21724 - protein, 11 aa, synthetic construct
  REGION 1..11: note = Description of Artificial Sequence: Synthetic peptide
IPAETGQETAY

SEQ ID NO: 21725 - protein, 9 aa, synthetic construct
  REGION 1..9: note = Description of Artificial Sequence: Synthetic peptide
EPIVGAETF

SEQ ID NO: 21726 - protein, 9 aa, synthetic construct
  REGION 1..9: note = Description of Artificial Sequence: Synthetic peptide
FPQGEAREF

SEQ ID NO: 21727 - protein, 9 aa, synthetic construct
  REGION 1..9: note = Description of Artificial Sequence: Synthetic peptide
NPEMVIYQY

SEQ ID NO: 21728 - protein, 9 aa, synthetic construct
  REGION 1..9: note = Description of Artificial Sequence: Synthetic peptide
IPVEPDTVL

SEQ ID NO: 21729 - protein, 9 aa, synthetic construct
  REGION 1..9: note = Description of Artificial Sequence: Synthetic peptide
DAELVVTTY

SEQ ID NO: 21730 - protein, 9 aa, synthetic construct
  REGION 1..9: note = Description of Artificial Sequence: Synthetic peptide
TVLDVGDAY

SEQ ID NO: 21731 - protein, 8 aa, synthetic construct
  REGION 1..8: note = Description of Artificial Sequence: Synthetic peptide
TPGPGIRY

SEQ ID NO: 21732 - protein, 9 aa, synthetic construct
  REGION 1..9: note = Description of Artificial Sequence: Synthetic peptide
SPAIFQHSM

SEQ ID NO: 21733 - protein, 9 aa, synthetic construct
  REGION 1..9: note = Description of Artificial Sequence: Synthetic peptide
DPNPQEVEM

SEQ ID NO: 21734 - protein, 9 aa, synthetic construct
  REGION 1..9: note = Description of Artificial Sequence: Synthetic peptide
PPVPVGEIY

SEQ ID NO: 21735 - protein, 9 aa, synthetic construct
  REGION 1..9: note = Description of Artificial Sequence: Synthetic peptide
NPDMVLYQY

SEQ ID NO: 21736 - protein, 10 aa, synthetic construct
  REGION 1..10: note = Description of Artificial Sequence: Synthetic peptide
SPAEIKNCSF

SEQ ID NO: 21737 - protein, 9 aa, synthetic construct
  REGION 1..9: note = Description of Artificial Sequence: Synthetic peptide
PPIPVGEIY

SEQ ID NO: 21738 - protein, 10 aa, synthetic construct
  REGION 1..10: note = Description of Artificial Sequence: Synthetic peptide
TPVRIIKILY

SEQ ID NO: 21739 - protein, 10 aa, synthetic construct
  REGION 1..10: note = Description of Artificial Sequence: Synthetic peptide
NPPVPVGEIY

SEQ ID NO: 21740 - protein, 10 aa, synthetic construct
  REGION 1..10: note = Description of Artificial Sequence: Synthetic peptide
NPPIPVGEIY

SEQ ID NO: 21741 - protein, 10 aa, synthetic construct
  REGION 1..10: note = Description of Artificial Sequence: Synthetic peptide
TAFNNPDCAW

SEQ ID NO: 21742 - protein, 9 aa, synthetic construct
  REGION 1..9: note = Description of Artificial Sequence: Synthetic peptide
DPNPQEVVL

SEQ ID NO: 21743 - protein, 9 aa, synthetic construct
  REGION 1..9: note = Description of Artificial Sequence: Synthetic peptide
SAEPVPLQL

SEQ ID NO: 21744 - protein, 9 aa, synthetic construct
  REGION 1..9: note = Description of Artificial Sequence: Synthetic peptide
FPISPIETV

SEQ ID NO: 21745 - protein, 11 aa, synthetic construct
  REGION 1..11: note = Description of Artificial Sequence: Synthetic peptide
HGAVTSSNTAF

SEQ ID NO: 21746 - protein, 9 aa, synthetic construct
  REGION 1..9: note = Description of Artificial Sequence: Synthetic peptide
IPVEPDTVL

SEQ ID NO: 21747 - protein, 9 aa, synthetic construct
  REGION 1..9: note = Description of Artificial Sequence: Synthetic peptide
DPNPQEVEM

SEQ ID NO: 21748 - protein, 9 aa, synthetic construct
  REGION 1..9: note = Description of Artificial Sequence: Synthetic peptide
DPNPQEVVL

SEQ ID NO: 21749 - protein, 9 aa, synthetic construct
  REGION 1..9: note = Description of Artificial Sequence: Synthetic peptide
QPDKSESEL

SEQ ID NO: 21750 - protein, 9 aa, synthetic construct
  REGION 1..9: note = Description of Artificial Sequence: Synthetic peptide
SAEPVPLQL

SEQ ID NO: 21751 - protein, 9 aa, synthetic construct
  REGION 1..9: note = Description of Artificial Sequence: Synthetic peptide
FPQGEAREF

SEQ ID NO: 21752 - protein, 9 aa, synthetic construct
  REGION 1..9: note = Description of Artificial Sequence: Synthetic peptide
VPLTAEAEL

SEQ ID NO: 21753 - protein, 9 aa, synthetic construct
  REGION 1..9: note = Description of Artificial Sequence: Synthetic peptide
QPDKSESDL

SEQ ID NO: 21754 - protein, 9 aa, synthetic construct
  REGION 1..9: note = Description of Artificial Sequence: Synthetic peptide
FPISPIETV

SEQ ID NO: 21755 - protein, 9 aa, synthetic construct
  REGION 1..9: note = Description of Artificial Sequence: Synthetic peptide
IPVEPDTVL

SEQ ID NO: 21756 - protein, 9 aa, synthetic construct
  REGION 1..9: note = Description of Artificial Sequence: Synthetic peptide
DPNPQEVVL

SEQ ID NO: 21757 - protein, 9 aa, synthetic construct
  REGION 1..9: note = Description of Artificial Sequence: Synthetic peptide
DPNPQEVEM

SEQ ID NO: 21758 - protein, 9 aa, synthetic construct
  REGION 1..9: note = Description of Artificial Sequence: Synthetic peptide
VPLTAEAEL

SEQ ID NO: 21759 - protein, 9 aa, synthetic construct
  REGION 1..9: note = Description of Artificial Sequence: Synthetic peptide
FPISPIETV

SEQ ID NO: 21760 - protein, 9 aa, synthetic construct
  REGION 1..9: note = Description of Artificial Sequence: Synthetic peptide
FPQGEAREF

SEQ ID NO: 21761 - protein, 9 aa, synthetic construct
  REGION 1..9: note = Description of Artificial Sequence: Synthetic peptide
SAEPVPLQL

SEQ ID NO: 21762 - protein, 9 aa, synthetic construct
  REGION 1..9: note = Description of Artificial Sequence: Synthetic peptide
TPQDLNTML

SEQ ID NO: 21763 - protein, 9 aa, synthetic construct
  REGION 1..9: note = Description of Artificial Sequence: Synthetic peptide
SPAIFQHSM

SEQ ID NO: 21764 - protein, 9 aa, synthetic construct
  REGION 1..9: note = Description of Artificial Sequence: Synthetic peptide
IVTDSQYAL

SEQ ID NO: 21765 - protein, 10 aa, synthetic construct
  REGION 1..10: note = Description of Artificial Sequence: Synthetic peptide
SPIETVPVKL

SEQ ID NO: 21766 - protein, 9 aa, synthetic construct
  REGION 1..9: note = Description of Artificial Sequence: Synthetic peptide
EPIVGAETF

SEQ ID NO: 21767 - protein, 10 aa, synthetic construct
  REGION 1..10: note = Description of Artificial Sequence: Synthetic peptide
NANPDCKTIL

SEQ ID NO: 21768 - protein, 9 aa, synthetic construct
  REGION 1..9: note = Description of Artificial Sequence: Synthetic peptide
TPDFWEVQL

SEQ ID NO: 21769 - protein, 11 aa, synthetic construct
  REGION 1..11: note = Description of Artificial Sequence: Synthetic peptide
VPLTAEAELEL

SEQ ID NO: 21770 - protein, 8 aa, synthetic construct
  REGION 1..8: note = Description of Artificial Sequence: Synthetic peptide
IPLGDAEL

SEQ ID NO: 21771 - protein, 9 aa, synthetic construct
  REGION 1..9: note = Description of Artificial Sequence: Synthetic peptide
QPDKSESEL

SEQ ID NO: 21772 - protein, 10 aa, synthetic construct
  REGION 1..10: note = Description of Artificial Sequence: Synthetic peptide
VPLTVGIIAL

SEQ ID NO: 21773 - protein, 11 aa, synthetic construct
  REGION 1..11: note = Description of Artificial Sequence: Synthetic peptide
IPAETGQETAY

SEQ ID NO: 21774 - protein, 9 aa, synthetic construct
  REGION 1..9: note = Description of Artificial Sequence: Synthetic peptide
IPVEPDTVL

SEQ ID NO: 21775 - protein, 9 aa, synthetic construct
  REGION 1..9: note = Description of Artificial Sequence: Synthetic peptide
FPQGEAREF

SEQ ID NO: 21776 - protein, 9 aa, synthetic construct
  REGION 1..9: note = Description of Artificial Sequence: Synthetic peptide
DPNPQEVEM

SEQ ID NO: 21777 - protein, 9 aa, synthetic construct
  REGION 1..9: note = Description of Artificial Sequence: Synthetic peptide
EPIVGAETF

SEQ ID NO: 21778 - protein, 9 aa, synthetic construct
  REGION 1..9: note = Description of Artificial Sequence: Synthetic peptide
NPDMVLYQY

SEQ ID NO: 21779 - protein, 9 aa, synthetic construct
  REGION 1..9: note = Description of Artificial Sequence: Synthetic peptide
DAELVVTTY

SEQ ID NO: 21780 - protein, 9 aa, synthetic construct
  REGION 1..9: note = Description of Artificial Sequence: Synthetic peptide
NPEMVIYQY

SEQ ID NO: 21781 - protein, 9 aa, synthetic construct
  REGION 1..9: note = Description of Artificial Sequence: Synthetic peptide
TVLDVGDAY

SEQ ID NO: 21782 - protein, 10 aa, synthetic construct
  REGION 1..10: note = Description of Artificial Sequence: Synthetic peptide
NPPVPVGEIY

SEQ ID NO: 21783 - protein, 9 aa, synthetic construct
  REGION 1..9: note = Description of Artificial Sequence: Synthetic peptide
DPNPQEVVL

SEQ ID NO: 21784 - protein, 9 aa, synthetic construct
  REGION 1..9: note = Description of Artificial Sequence: Synthetic peptide
SPAIFQHSM

SEQ ID NO: 21785 - protein, 10 aa, synthetic construct
  REGION 1..10: note = Description of Artificial Sequence: Synthetic peptide
NPPIPVGEIY

SEQ ID NO: 21786 - protein, 8 aa, synthetic construct
  REGION 1..8: note = Description of Artificial Sequence: Synthetic peptide
TPGPGIRY

SEQ ID NO: 21787 - protein, 9 aa, synthetic construct
  REGION 1..9: note = Description of Artificial Sequence: Synthetic peptide
IPVEPDTVL

SEQ ID NO: 21788 - protein, 9 aa, synthetic construct
  REGION 1..9: note = Description of Artificial Sequence: Synthetic peptide
DPNPQEVEM

SEQ ID NO: 21789 - protein, 9 aa, synthetic construct
  REGION 1..9: note = Description of Artificial Sequence: Synthetic peptide
DPNPQEVVL

SEQ ID NO: 21790 - protein, 9 aa, synthetic construct
  REGION 1..9: note = Description of Artificial Sequence: Synthetic peptide
QPDKSESEL

SEQ ID NO: 21791 - protein, 9 aa, synthetic construct
  REGION 1..9: note = Description of Artificial Sequence: Synthetic peptide
FPQGEAREF

SEQ ID NO: 21792 - protein, 9 aa, synthetic construct
  REGION 1..9: note = Description of Artificial Sequence: Synthetic peptide
VPLTAEAEL

SEQ ID NO: 21793 - protein, 9 aa, synthetic construct
  REGION 1..9: note = Description of Artificial Sequence: Synthetic peptide
SAEPVPLQL

SEQ ID NO: 21794 - protein, 9 aa, synthetic construct
  REGION 1..9: note = Description of Artificial Sequence: Synthetic peptide
QPDKSESDL

SEQ ID NO: 21795 - protein, 9 aa, synthetic construct
  REGION 1..9: note = Description of Artificial Sequence: Synthetic peptide
TPDFWEVQL

SEQ ID NO: 21796 - protein, 9 aa, synthetic construct
  REGION 1..9: note = Description of Artificial Sequence: Synthetic peptide
FPISPIETV

SEQ ID NO: 21797 - protein, 8 aa, synthetic construct
  REGION 1..8: note = Description of Artificial Sequence: Synthetic peptide
IPLGDAEL

SEQ ID NO: 21798 - protein, 9 aa, synthetic construct
  REGION 1..9: note = Description of Artificial Sequence: Synthetic peptide
HIPLGDAEL

SEQ ID NO: 21799 - protein, 9 aa, synthetic construct
  REGION 1..9: note = Description of Artificial Sequence: Synthetic peptide
EPIVGAETF

SEQ ID NO: 21800 - protein, 9 aa, synthetic construct
  REGION 1..9: note = Description of Artificial Sequence: Synthetic peptide
QDLARHGAV

SEQ ID NO: 21801 - protein, 8 aa, synthetic construct
  REGION 1..8: note = Description of Artificial Sequence: Synthetic peptide
MENVTENF

SEQ ID NO: 21802 - protein, 9 aa, synthetic construct
  REGION 1..9: note = Description of Artificial Sequence: Synthetic peptide
TDEIKNCSF

SEQ ID NO: 21803 - protein, 8 aa, synthetic construct
  REGION 1..8: note = Description of Artificial Sequence: Synthetic peptide
AEHLKTAV

SEQ ID NO: 21804 - protein, 8 aa, synthetic construct
  REGION 1..8: note = Description of Artificial Sequence: Synthetic peptide
ADQLIHIY

SEQ ID NO: 21805 - protein, 8 aa, synthetic construct
  REGION 1..8: note = Description of Artificial Sequence: Synthetic peptide
KEATTTLF

SEQ ID NO: 21806 - protein, 8 aa, synthetic construct
  REGION 1..8: note = Description of Artificial Sequence: Synthetic peptide
YETEVHNV

SEQ ID NO: 21807 - protein, 8 aa, synthetic construct
  REGION 1..8: note = Description of Artificial Sequence: Synthetic peptide
LENVTENF

SEQ ID NO: 21808 - protein, 9 aa, synthetic construct
  REGION 1..9: note = Description of Artificial Sequence: Synthetic peptide
TEVVQKVAM

SEQ ID NO: 21809 - protein, 9 aa, synthetic construct
  REGION 1..9: note = Description of Artificial Sequence: Synthetic peptide
IHTDNGTNF

SEQ ID NO: 21810 - protein, 10 aa, synthetic construct
  REGION 1..10: note = Description of Artificial Sequence: Synthetic peptide
EHFKNGTITF

SEQ ID NO: 21811 - protein, 9 aa, synthetic construct
  REGION 1..9: note = Description of Artificial Sequence: Synthetic peptide
IHTDNGSNF

SEQ ID NO: 21812 - protein, 9 aa, synthetic construct
  REGION 1..9: note = Description of Artificial Sequence: Synthetic peptide
QRQGTEPSF

SEQ ID NO: 21813 - protein, 11 aa, synthetic construct
  REGION 1..11: note = Description of Artificial Sequence: Synthetic peptide
TQVDPGLADQL

SEQ ID NO: 21814 - protein, 9 aa, synthetic construct
  REGION 1..9: note = Description of Artificial Sequence: Synthetic peptide
EQSPPLTSL

SEQ ID NO: 21815 - protein, 9 aa, synthetic construct
  REGION 1..9: note = Description of Artificial Sequence: Synthetic peptide
TQDFWEVQL

SEQ ID NO: 21816 - protein, 9 aa, synthetic construct
  REGION 1..9: note = Description of Artificial Sequence: Synthetic peptide
YRTQVDPGL

SEQ ID NO: 21817 - protein, 9 aa, synthetic construct
  REGION 1..9: note = Description of Artificial Sequence: Synthetic peptide
NHTSTIYRL

SEQ ID NO: 21818 - protein, 9 aa, synthetic construct
  REGION 1..9: note = Description of Artificial Sequence: Synthetic peptide
EQGPPLTSL

SEQ ID NO: 21819 - protein, 9 aa, synthetic construct
  REGION 1..9: note = Description of Artificial Sequence: Synthetic peptide
GHQAAMQML

SEQ ID NO: 21820 - protein, 11 aa, synthetic construct
  REGION 1..11: note = Description of Artificial Sequence: Synthetic peptide
GHLILGNIDNL

SEQ ID NO: 21821 - protein, 10 aa, synthetic construct
  REGION 1..10: note = Description of Artificial Sequence: Synthetic peptide
VHIPLGDAEL

SEQ ID NO: 21822 - protein, 9 aa, synthetic construct
  REGION 1..9: note = Description of Artificial Sequence: Synthetic peptide
THLEGKIIL

SEQ ID NO: 21823 - protein, 9 aa, synthetic construct
  REGION 1..9: note = Description of Artificial Sequence: Synthetic peptide
AHTNDVKQL

SEQ ID NO: 21824 - protein, 9 aa, synthetic construct
  REGION 1..9: note = Description of Artificial Sequence: Synthetic peptide
EHLKTAVQM

SEQ ID NO: 21825 - protein, 9 aa, synthetic construct
  REGION 1..9: note = Description of Artificial Sequence: Synthetic peptide
TQVGSLQYL

SEQ ID NO: 21826 - protein, 11 aa, synthetic construct
  REGION 1..11: note = Description of Artificial Sequence: Synthetic peptide
TQVEPDLADQL

SEQ ID NO: 21827 - protein, 9 aa, synthetic construct
  REGION 1..9: note = Description of Artificial Sequence: Synthetic peptide
SQVTNPVVM

SEQ ID NO: 21828 - protein, 9 aa, synthetic construct
  REGION 1..9: note = Description of Artificial Sequence: Synthetic peptide
YRTQVEPDL

SEQ ID NO: 21829 - protein, 9 aa, synthetic construct
  REGION 1..9: note = Description of Artificial Sequence: Synthetic peptide
SQVTNPVVM

SEQ ID NO: 21830 - protein, 9 aa, synthetic construct
  REGION 1..9: note = Description of Artificial Sequence: Synthetic peptide
YRTQVEPDL

SEQ ID NO: 21831 - protein, 9 aa, synthetic construct
  REGION 1..9: note = Description of Artificial Sequence: Synthetic peptide
EQSPPLTSL

SEQ ID NO: 21832 - protein, 9 aa, synthetic construct
  REGION 1..9: note = Description of Artificial Sequence: Synthetic peptide
EQGPPLTSL

SEQ ID NO: 21833 - protein, 11 aa, synthetic construct
  REGION 1..11: note = Description of Artificial Sequence: Synthetic peptide
TQVDPGLADQL

SEQ ID NO: 21834 - protein, 9 aa, synthetic construct
  REGION 1..9: note = Description of Artificial Sequence: Synthetic peptide
YRTQVDPGL

SEQ ID NO: 21835 - protein, 9 aa, synthetic construct
  REGION 1..9: note = Description of Artificial Sequence: Synthetic peptide
QRQGTEPSF

SEQ ID NO: 21836 - protein, 9 aa, synthetic construct
  REGION 1..9: note = Description of Artificial Sequence: Synthetic peptide
SQVTNSAVM

SEQ ID NO: 21837 - protein, 9 aa, synthetic construct
  REGION 1..9: note = Description of Artificial Sequence: Synthetic peptide
EHLKTAVQM

SEQ ID NO: 21838 - protein, 9 aa, synthetic construct
  REGION 1..9: note = Description of Artificial Sequence: Synthetic peptide
IHTDNGTNF

SEQ ID NO: 21839 - protein, 8 aa, synthetic construct
  REGION 1..8: note = Description of Artificial Sequence: Synthetic peptide
MHTDIISL

SEQ ID NO: 21840 - protein, 10 aa, synthetic construct
  REGION 1..10: note = Description of Artificial Sequence: Synthetic peptide
EHFKNGTITF

SEQ ID NO: 21841 - protein, 9 aa, synthetic construct
  REGION 1..9: note = Description of Artificial Sequence: Synthetic peptide
GQKAIGTVL

SEQ ID NO: 21842 - protein, 11 aa, synthetic construct
  REGION 1..11: note = Description of Artificial Sequence: Synthetic peptide
TQVEPDLADQL

SEQ ID NO: 21843 - protein, 9 aa, synthetic construct
  REGION 1..9: note = Description of Artificial Sequence: Synthetic peptide
IHTDNGSNF

SEQ ID NO: 21844 - protein, 9 aa, synthetic construct
  REGION 1..9: note = Description of Artificial Sequence: Synthetic peptide
ERSGTGSSF

SEQ ID NO: 21845 - protein, 9 aa, synthetic construct
  REGION 1..9: note = Description of Artificial Sequence: Synthetic peptide
DRVGTQPAA

SEQ ID NO: 21846 - protein, 9 aa, synthetic construct
  REGION 1..9: note = Description of Artificial Sequence: Synthetic peptide
EQVDKLVSA

SEQ ID NO: 21847 - protein, 10 aa, synthetic construct
  REGION 1..10: note = Description of Artificial Sequence: Synthetic peptide
SQYALGIIQA

SEQ ID NO: 21848 - protein, 8 aa, synthetic construct
  REGION 1..8: note = Description of Artificial Sequence: Synthetic peptide
SQVTNPVV

SEQ ID NO: 21849 - protein, 8 aa, synthetic construct
  REGION 1..8: note = Description of Artificial Sequence: Synthetic peptide
WQRPVVTV

SEQ ID NO: 21850 - protein, 9 aa, synthetic construct
  REGION 1..9: note = Description of Artificial Sequence: Synthetic peptide
VQLGIPHPA

SEQ ID NO: 21851 - protein, 8 aa, synthetic construct
  REGION 1..8: note = Description of Artificial Sequence: Synthetic peptide
THGIKPVV

SEQ ID NO: 21852 - protein, 8 aa, synthetic construct
  REGION 1..8: note = Description of Artificial Sequence: Synthetic peptide
QRTTTPYA

SEQ ID NO: 21853 - protein, 8 aa, synthetic construct
  REGION 1..8: note = Description of Artificial Sequence: Synthetic peptide
TDIVPLTA

SEQ ID NO: 21854 - protein, 9 aa, synthetic construct
  REGION 1..9: note = Description of Artificial Sequence: Synthetic peptide
QRPVVTVKV

SEQ ID NO: 21855 - protein, 8 aa, synthetic construct
  REGION 1..8: note = Description of Artificial Sequence: Synthetic peptide
SQVTNSAV

SEQ ID NO: 21856 - protein, 8 aa, synthetic construct
  REGION 1..8: note = Description of Artificial Sequence: Synthetic peptide
TEVVQKVA

SEQ ID NO: 21857 - protein, 9 aa, synthetic construct
  REGION 1..9: note = Description of Artificial Sequence: Synthetic peptide
QRPIVTIKV

SEQ ID NO: 21858 - protein, 9 aa, synthetic construct
  REGION 1..9: note = Description of Artificial Sequence: Synthetic peptide
QQHLLQLTV

SEQ ID NO: 21859 - protein, 8 aa, synthetic construct
  REGION 1..8: note = Description of Artificial Sequence: Synthetic peptide
MHTDIISL

SEQ ID NO: 21860 - protein, 8 aa, synthetic construct
  REGION 1..8: note = Description of Artificial Sequence: Synthetic peptide
SQRVLSSC

SEQ ID NO: 21861 - protein, 8 aa, synthetic construct
  REGION 1..8: note = Description of Artificial Sequence: Synthetic peptide
DQVLIEIC

SEQ ID NO: 21862 - protein, 10 aa, synthetic construct
  REGION 1..10: note = Description of Artificial Sequence: Synthetic peptide
KEQSPPLTSL

SEQ ID NO: 21863 - protein, 10 aa, synthetic construct
  REGION 1..10: note = Description of Artificial Sequence: Synthetic peptide
IEVKDTKEAL

SEQ ID NO: 21864 - protein, 10 aa, synthetic construct
  REGION 1..10: note = Description of Artificial Sequence: Synthetic peptide
TETTNQKAEL

SEQ ID NO: 21865 - protein, 10 aa, synthetic construct
  REGION 1..10: note = Description of Artificial Sequence: Synthetic peptide
TETTNQKTEL

SEQ ID NO: 21866 - protein, 10 aa, synthetic construct
  REGION 1..10: note = Description of Artificial Sequence: Synthetic peptide
QEQGPPLTSL

SEQ ID NO: 21867 - protein, 9 aa, synthetic construct
  REGION 1..9: note = Description of Artificial Sequence: Synthetic peptide
MEDEHREVL

SEQ ID NO: 21868 - protein, 9 aa, synthetic construct
  REGION 1..9: note = Description of Artificial Sequence: Synthetic peptide
TEVVQKVAM

SEQ ID NO: 21869 - protein, 9 aa, synthetic construct
  REGION 1..9: note = Description of Artificial Sequence: Synthetic peptide
YESNPYPNL

SEQ ID NO: 21870 - protein, 10 aa, synthetic construct
  REGION 1..10: note = Description of Artificial Sequence: Synthetic peptide
KEIGNYSDTI

SEQ ID NO: 21871 - protein, 9 aa, synthetic construct
  REGION 1..9: note = Description of Artificial Sequence: Synthetic peptide
SEGATPQDL

SEQ ID NO: 21872 - protein, 10 aa, synthetic construct
  REGION 1..10: note = Description of Artificial Sequence: Synthetic peptide
QEIKNSAINL

SEQ ID NO: 21873 - protein, 11 aa, synthetic construct
  REGION 1..11: note = Description of Artificial Sequence: Synthetic peptide
NETGENGTITL

SEQ ID NO: 21874 - protein, 8 aa, synthetic construct
  REGION 1..8: note = Description of Artificial Sequence: Synthetic peptide
IETVPVKL

SEQ ID NO: 21875 - protein, 9 aa, synthetic construct
  REGION 1..9: note = Description of Artificial Sequence: Synthetic peptide
MEDEHREIL

SEQ ID NO: 21876 - protein, 10 aa, synthetic construct
  REGION 1..10: note = Description of Artificial Sequence: Synthetic peptide
QELKNSAISL

SEQ ID NO: 21877 - protein, 11 aa, synthetic construct
  REGION 1..11: note = Description of Artificial Sequence: Synthetic peptide
QEIKNSAINLL

SEQ ID NO: 21878 - protein, 8 aa, synthetic construct
  REGION 1..8: note = Description of Artificial Sequence: Synthetic peptide
GENGTITL

SEQ ID NO: 21879 - protein, 9 aa, synthetic construct
  REGION 1..9: note = Description of Artificial Sequence: Synthetic peptide
SESAIRKAL

SEQ ID NO: 21880 - protein, 9 aa, synthetic construct
  REGION 1..9: note = Description of Artificial Sequence: Synthetic peptide
QEKNEQDLL

SEQ ID NO: 21881 - protein, 10 aa, synthetic construct
  REGION 1..10: note = Description of Artificial Sequence: Synthetic peptide
IEAQQQMLQL

SEQ ID NO: 21882 - protein, 10 aa, synthetic construct
  REGION 1..10: note = Description of Artificial Sequence: Synthetic peptide
IEAQQHLLQL

SEQ ID NO: 21883 - protein, 10 aa, synthetic construct
  REGION 1..10: note = Description of Artificial Sequence: Synthetic peptide
AEHLKTAVQM

SEQ ID NO: 21884 - protein, 9 aa, synthetic construct
  REGION 1..9: note = Description of Artificial Sequence: Synthetic peptide
VEPDLADQL

SEQ ID NO: 21885 - protein, 8 aa, synthetic construct
  REGION 1..8: note = Description of Artificial Sequence: Synthetic peptide
AELQAICL

SEQ ID NO: 21886 - protein, 8 aa, synthetic construct
  REGION 1..8: note = Description of Artificial Sequence: Synthetic peptide
IEAQQHLL

SEQ ID NO: 21887 - protein, 8 aa, synthetic construct
  REGION 1..8: note = Description of Artificial Sequence: Synthetic peptide
GETGHLIL

SEQ ID NO: 21888 - protein, 9 aa, synthetic construct
  REGION 1..9: note = Description of Artificial Sequence: Synthetic peptide
SESDLVNQI

SEQ ID NO: 21889 - protein, 9 aa, synthetic construct
  REGION 1..9: note = Description of Artificial Sequence: Synthetic peptide
TEVVQKVAM

SEQ ID NO: 21890 - protein, 8 aa, synthetic construct
  REGION 1..8: note = Description of Artificial Sequence: Synthetic peptide
GEKITPSL

SEQ ID NO: 21891 - protein, 10 aa, synthetic construct
  REGION 1..10: note = Description of Artificial Sequence: Synthetic peptide
QEQGPPLTSL

SEQ ID NO: 21892 - protein, 10 aa, synthetic construct
  REGION 1..10: note = Description of Artificial Sequence: Synthetic peptide
KEQSPPLTSL

SEQ ID NO: 21893 - protein, 10 aa, synthetic construct
  REGION 1..10: note = Description of Artificial Sequence: Synthetic peptide
TETTNQKTEL

SEQ ID NO: 21894 - protein, 9 aa, synthetic construct
  REGION 1..9: note = Description of Artificial Sequence: Synthetic peptide
YESNPYPNL

SEQ ID NO: 21895 - protein, 8 aa, synthetic construct
  REGION 1..8: note = Description of Artificial Sequence: Synthetic peptide
TDIQTKEL

SEQ ID NO: 21896 - protein, 10 aa, synthetic construct
  REGION 1..10: note = Description of Artificial Sequence: Synthetic peptide
TETTNQKAEL

SEQ ID NO: 21897 - protein, 10 aa, synthetic construct
  REGION 1..10: note = Description of Artificial Sequence: Synthetic peptide
AEHLKTAVQM

SEQ ID NO: 21898 - protein, 11 aa, synthetic construct
  REGION 1..11: note = Description of Artificial Sequence: Synthetic peptide
QEIKNSAINLL

SEQ ID NO: 21899 - protein, 9 aa, synthetic construct
  REGION 1..9: note = Description of Artificial Sequence: Synthetic peptide
MEDEHREVL

SEQ ID NO: 21900 - protein, 9 aa, synthetic construct
  REGION 1..9: note = Description of Artificial Sequence: Synthetic peptide
SESAIRKAL

SEQ ID NO: 21901 - protein, 10 aa, synthetic construct
  REGION 1..10: note = Description of Artificial Sequence: Synthetic peptide
IEVKDTKEAL

SEQ ID NO: 21902 - protein, 8 aa, synthetic construct
  REGION 1..8: note = Description of Artificial Sequence: Synthetic peptide
AELQAICL

SEQ ID NO: 21903 - protein, 10 aa, synthetic construct
  REGION 1..10: note = Description of Artificial Sequence: Synthetic peptide
IEAQQHLLQL

SEQ ID NO: 21904 - protein, 8 aa, synthetic construct
  REGION 1..8: note = Description of Artificial Sequence: Synthetic peptide
IETVPVKL

SEQ ID NO: 21905 - protein, 9 aa, synthetic construct
  REGION 1..9: note = Description of Artificial Sequence: Synthetic peptide
YETEVHNVW

SEQ ID NO: 21906 - protein, 10 aa, synthetic construct
  REGION 1..10: note = Description of Artificial Sequence: Synthetic peptide
QELKNSAISL

SEQ ID NO: 21907 - protein, 11 aa, synthetic construct
  REGION 1..11: note = Description of Artificial Sequence: Synthetic peptide
NETGENGTITL

SEQ ID NO: 21908 - protein, 8 aa, synthetic construct
  REGION 1..8: note = Description of Artificial Sequence: Synthetic peptide
TELQAIHL

SEQ ID NO: 21909 - protein, 8 aa, synthetic construct
  REGION 1..8: note = Description of Artificial Sequence: Synthetic peptide
IEAQQQML

SEQ ID NO: 21910 - protein, 8 aa, synthetic construct
  REGION 1..8: note = Description of Artificial Sequence: Synthetic peptide
GENGTITL

SEQ ID NO: 21911 - protein, 10 aa, synthetic construct
  REGION 1..10: note = Description of Artificial Sequence: Synthetic peptide
QEIKNSAINL

SEQ ID NO: 21912 - protein, 8 aa, synthetic construct
  REGION 1..8: note = Description of Artificial Sequence: Synthetic peptide
IEAQQHLL

SEQ ID NO: 21913 - protein, 10 aa, synthetic construct
  REGION 1..10: note = Description of Artificial Sequence: Synthetic peptide
IEAQQQMLQL

SEQ ID NO: 21914 - protein, 9 aa, synthetic construct
  REGION 1..9: note = Description of Artificial Sequence: Synthetic peptide
SDFNLPPVV

SEQ ID NO: 21915 - protein, 8 aa, synthetic construct
  REGION 1..8: note = Description of Artificial Sequence: Synthetic peptide
GETGHLIL

SEQ ID NO: 21916 - protein, 11 aa, synthetic construct
  REGION 1..11: note = Description of Artificial Sequence: Synthetic peptide
SELVNQIIEQL

SEQ ID NO: 21917 - protein, 9 aa, synthetic construct
  REGION 1..9: note = Description of Artificial Sequence: Synthetic peptide
SEGATPQDL

SEQ ID NO: 21918 - protein, 10 aa, synthetic construct
  REGION 1..10: note = Description of Artificial Sequence: Synthetic peptide
KEIGNYSDTI

SEQ ID NO: 21919 - protein, 9 aa, synthetic construct
  REGION 1..9: note = Description of Artificial Sequence: Synthetic peptide
SESDLVNQI

SEQ ID NO: 21920 - protein, 9 aa, synthetic construct
  REGION 1..9: note = Description of Artificial Sequence: Synthetic peptide
LETEPIVGA

SEQ ID NO: 21921 - protein, 8 aa, synthetic construct
  REGION 1..8: note = Description of Artificial Sequence: Synthetic peptide
YETEVHNV

SEQ ID NO: 21922 - protein, 9 aa, synthetic construct
  REGION 1..9: note = Description of Artificial Sequence: Synthetic peptide
SESELVNQI

SEQ ID NO: 21923 - protein, 10 aa, synthetic construct
  REGION 1..10: note = Description of Artificial Sequence: Synthetic peptide
KEISNHTSTI

SEQ ID NO: 21924 - protein, 8 aa, synthetic construct
  REGION 1..8: note = Description of Artificial Sequence: Synthetic peptide
AELVVTTY

SEQ ID NO: 21925 - protein, 10 aa, synthetic construct
  REGION 1..10: note = Description of Artificial Sequence: Synthetic peptide
REFSSEQTRA

SEQ ID NO: 21926 - protein, 9 aa, synthetic construct
  REGION 1..9: note = Description of Artificial Sequence: Synthetic peptide
LETEPIVGA

SEQ ID NO: 21927 - protein, 8 aa, synthetic construct
  REGION 1..8: note = Description of Artificial Sequence: Synthetic peptide
TEVVQKVA

SEQ ID NO: 21928 - protein, 9 aa, synthetic construct
  REGION 1..9: note = Description of Artificial Sequence: Synthetic peptide
GENGTITLP

SEQ ID NO: 21929 - protein, 9 aa, synthetic construct
  REGION 1..9: note = Description of Artificial Sequence: Synthetic peptide
TELQAIHLA

SEQ ID NO: 21930 - protein, 9 aa, synthetic construct
  REGION 1..9: note = Description of Artificial Sequence: Synthetic peptide
TETLLVQNA

SEQ ID NO: 21931 - protein, 9 aa, synthetic construct
  REGION 1..9: note = Description of Artificial Sequence: Synthetic peptide
EEVGFPVRP

SEQ ID NO: 21932 - protein, 11 aa, synthetic construct
  REGION 1..11: note = Description of Artificial Sequence: Synthetic peptide
REVLASQQREA

SEQ ID NO: 21933 - protein, 11 aa, synthetic construct
  REGION 1..11: note = Description of Artificial Sequence: Synthetic peptide
AEAMSQVTNSA

SEQ ID NO: 21934 - protein, 9 aa, synthetic construct
  REGION 1..9: note = Description of Artificial Sequence: Synthetic peptide
IEVKDTKEA

SEQ ID NO: 21935 - protein, 9 aa, synthetic construct
  REGION 1..9: note = Description of Artificial Sequence: Synthetic peptide
QEFGIPYNP

SEQ ID NO: 21936 - protein, 9 aa, synthetic construct
  REGION 1..9: note = Description of Artificial Sequence: Synthetic peptide
GELGSPQIP

SEQ ID NO: 21937 - protein, 10 aa, synthetic construct
  REGION 1..10: note = Description of Artificial Sequence: Synthetic peptide
SDFNLPPVVA

SEQ ID NO: 21938 - protein, 8 aa, synthetic construct
  REGION 1..8: note = Description of Artificial Sequence: Synthetic peptide
SESAIRKA

SEQ ID NO: 21939 - protein, 9 aa, synthetic construct
  REGION 1..9: note = Description of Artificial Sequence: Synthetic peptide
AELQAICLA

SEQ ID NO: 21940 - protein, 10 aa, synthetic construct
  REGION 1..10: note = Description of Artificial Sequence: Synthetic peptide
KEATPTLFCA

SEQ ID NO: 21941 - protein, 9 aa, synthetic construct
  REGION 1..9: note = Description of Artificial Sequence: Synthetic peptide
TEVVQKVAM

SEQ ID NO: 21942 - protein, 8 aa, synthetic construct
  REGION 1..8: note = Description of Artificial Sequence: Synthetic peptide
GEKITPSL

SEQ ID NO: 21943 - protein, 9 aa, synthetic construct
  REGION 1..9: note = Description of Artificial Sequence: Synthetic peptide
SESAIRKAL

SEQ ID NO: 21944 - protein, 10 aa, synthetic construct
  REGION 1..10: note = Description of Artificial Sequence: Synthetic peptide
QEQGPPLTSL

SEQ ID NO: 21945 - protein, 9 aa, synthetic construct
  REGION 1..9: note = Description of Artificial Sequence: Synthetic peptide
MEDEHREVL

SEQ ID NO: 21946 - protein, 10 aa, synthetic construct
  REGION 1..10: note = Description of Artificial Sequence: Synthetic peptide
KEQSPPLTSL

SEQ ID NO: 21947 - protein, 8 aa, synthetic construct
  REGION 1..8: note = Description of Artificial Sequence: Synthetic peptide
TDIQTKEL

SEQ ID NO: 21948 - protein, 8 aa, synthetic construct
  REGION 1..8: note = Description of Artificial Sequence: Synthetic peptide
AELQAICL

SEQ ID NO: 21949 - protein, 8 aa, synthetic construct
  REGION 1..8: note = Description of Artificial Sequence: Synthetic peptide
AEHLKTAV

SEQ ID NO: 21950 - protein, 9 aa, synthetic construct
  REGION 1..9: note = Description of Artificial Sequence: Synthetic peptide
SESAVRKAI

SEQ ID NO: 21951 - protein, 9 aa, synthetic construct
  REGION 1..9: note = Description of Artificial Sequence: Synthetic peptide
GEQDKNRSV

SEQ ID NO: 21952 - protein, 8 aa, synthetic construct
  REGION 1..8: note = Description of Artificial Sequence: Synthetic peptide
IEAQQQML

SEQ ID NO: 21953 - protein, 10 aa, synthetic construct
  REGION 1..10: note = Description of Artificial Sequence: Synthetic peptide
TETTNQKTEL

SEQ ID NO: 21954 - protein, 9 aa, synthetic construct
  REGION 1..9: note = Description of Artificial Sequence: Synthetic peptide
YESNPYPNL

SEQ ID NO: 21955 - protein, 8 aa, synthetic construct
  REGION 1..8: note = Description of Artificial Sequence: Synthetic peptide
SERQANFL

SEQ ID NO: 21956 - protein, 9 aa, synthetic construct
  REGION 1..9: note = Description of Artificial Sequence: Synthetic peptide
MEDEHREIL

SEQ ID NO: 21957 - protein, 8 aa, synthetic construct
  REGION 1..8: note = Description of Artificial Sequence: Synthetic peptide
IEAQQHLL

SEQ ID NO: 21958 - protein, 9 aa, synthetic construct
  REGION 1..9: note = Description of Artificial Sequence: Synthetic peptide
QEKNEQDLL

SEQ ID NO: 21959 - protein, 8 aa, synthetic construct
  REGION 1..8: note = Description of Artificial Sequence: Synthetic peptide
REISQRVL

SEQ ID NO: 21960 - protein, 9 aa, synthetic construct
  REGION 1..9: note = Description of Artificial Sequence: Synthetic peptide
YETEVHNVW

SEQ ID NO: 21961 - protein, 8 aa, synthetic construct
  REGION 1..8: note = Description of Artificial Sequence: Synthetic peptide
TELQAIHL

SEQ ID NO: 21962 - protein, 10 aa, synthetic construct
  REGION 1..10: note = Description of Artificial Sequence: Synthetic peptide
TETTNQKAEL

SEQ ID NO: 21963 - protein, 10 aa, synthetic construct
  REGION 1..10: note = Description of Artificial Sequence: Synthetic peptide
AEHLKTAVQM

SEQ ID NO: 21964 - protein, 8 aa, synthetic construct
  REGION 1..8: note = Description of Artificial Sequence: Synthetic peptide
TERQANFL

SEQ ID NO: 21965 - protein, 8 aa, synthetic construct
  REGION 1..8: note = Description of Artificial Sequence: Synthetic peptide
GENGTITL

SEQ ID NO: 21966 - protein, 8 aa, synthetic construct
  REGION 1..8: note = Description of Artificial Sequence: Synthetic peptide
GERIVDII

SEQ ID NO: 21967 - protein, 8 aa, synthetic construct
  REGION 1..8: note = Description of Artificial Sequence: Synthetic peptide
GQMVHQAL

SEQ ID NO: 21968 - protein, 10 aa, synthetic construct
  REGION 1..10: note = Description of Artificial Sequence: Synthetic peptide
SESAVRKAIL

SEQ ID NO: 21969 - protein, 9 aa, synthetic construct
  REGION 1..9: note = Description of Artificial Sequence: Synthetic peptide
KEKGGLDGL

SEQ ID NO: 21970 - protein, 9 aa, synthetic construct
  REGION 1..9: note = Description of Artificial Sequence: Synthetic peptide
SERLLSACL

SEQ ID NO: 21971 - protein, 9 aa, synthetic construct
  REGION 1..9: note = Description of Artificial Sequence: Synthetic peptide
TEMEKEGKI

SEQ ID NO: 21972 - protein, 8 aa, synthetic construct
  REGION 1..8: note = Description of Artificial Sequence: Synthetic peptide
AELVVTTY

SEQ ID NO: 21973 - protein, 9 aa, synthetic construct
  REGION 1..9: note = Description of Artificial Sequence: Synthetic peptide
GEQDKDRSV

SEQ ID NO: 21974 - protein, 10 aa, synthetic construct
  REGION 1..10: note = Description of Artificial Sequence: Synthetic peptide
QELKNSAISL

SEQ ID NO: 21975 - protein, 10 aa, synthetic construct
  REGION 1..10: note = Description of Artificial Sequence: Synthetic peptide
QEIKNSAINL

SEQ ID NO: 21976 - protein, 11 aa, synthetic construct
  REGION 1..11: note = Description of Artificial Sequence: Synthetic peptide
AEQATQEVKNW

SEQ ID NO: 21977 - protein, 9 aa, synthetic construct
  REGION 1..9: note = Description of Artificial Sequence: Synthetic peptide
YETEVHNVW

SEQ ID NO: 21978 - protein, 9 aa, synthetic construct
  REGION 1..9: note = Description of Artificial Sequence: Synthetic peptide
SESAIRKAL

SEQ ID NO: 21979 - protein, 9 aa, synthetic construct
  REGION 1..9: note = Description of Artificial Sequence: Synthetic peptide
EEINLPGKW

SEQ ID NO: 21980 - protein, 11 aa, synthetic construct
  REGION 1..11: note = Description of Artificial Sequence: Synthetic peptide
SEVNIVTDSQY

SEQ ID NO: 21981 - protein, 9 aa, synthetic construct
  REGION 1..9: note = Description of Artificial Sequence: Synthetic peptide
AELVVTTYW

SEQ ID NO: 21982 - protein, 11 aa, synthetic construct
  REGION 1..11: note = Description of Artificial Sequence: Synthetic peptide
AEIQKQGNDQW

SEQ ID NO: 21983 - protein, 10 aa, synthetic construct
  REGION 1..10: note = Description of Artificial Sequence: Synthetic peptide
QEQGPPLTSL

SEQ ID NO: 21984 - protein, 9 aa, synthetic construct
  REGION 1..9: note = Description of Artificial Sequence: Synthetic peptide
SESAVRKAI

SEQ ID NO: 21985 - protein, 11 aa, synthetic construct
  REGION 1..11: note = Description of Artificial Sequence: Synthetic peptide
NEQDLLALDKW

SEQ ID NO: 21986 - protein, 10 aa, synthetic construct
  REGION 1..10: note = Description of Artificial Sequence: Synthetic peptide
NETPGVRYQY

SEQ ID NO: 21987 - protein, 9 aa, synthetic construct
  REGION 1..9: note = Description of Artificial Sequence: Synthetic peptide
EEIWNNMTW

SEQ ID NO: 21988 - protein, 9 aa, synthetic construct
  REGION 1..9: note = Description of Artificial Sequence: Synthetic peptide
SEIWENMTW

SEQ ID NO: 21989 - protein, 10 aa, synthetic construct
  REGION 1..10: note = Description of Artificial Sequence: Synthetic peptide
NETPGIRYQY

SEQ ID NO: 21990 - protein, 9 aa, synthetic construct
  REGION 1..9: note = Description of Artificial Sequence: Synthetic peptide
SESDLVNQI

SEQ ID NO: 21991 - protein, 10 aa, synthetic construct
  REGION 1..10: note = Description of Artificial Sequence: Synthetic peptide
VEMENVTENF

SEQ ID NO: 21992 - protein, 9 aa, synthetic construct
  REGION 1..9: note = Description of Artificial Sequence: Synthetic peptide
AETGQETAY

SEQ ID NO: 21993 - protein, 11 aa, synthetic construct
  REGION 1..11: note = Description of Artificial Sequence: Synthetic peptide
SEVNIVTDSQY

SEQ ID NO: 21994 - protein, 9 aa, synthetic construct
  REGION 1..9: note = Description of Artificial Sequence: Synthetic peptide
YETEVHNVW

SEQ ID NO: 21995 - protein, 9 aa, synthetic construct
  REGION 1..9: note = Description of Artificial Sequence: Synthetic peptide
EEINLPGKW

SEQ ID NO: 21996 - protein, 11 aa, synthetic construct
  REGION 1..11: note = Description of Artificial Sequence: Synthetic peptide
AEQATQEVKNW

SEQ ID NO: 21997 - protein, 9 aa, synthetic construct
  REGION 1..9: note = Description of Artificial Sequence: Synthetic peptide
SESAIRKAL

SEQ ID NO: 21998 - protein, 11 aa, synthetic construct
  REGION 1..11: note = Description of Artificial Sequence: Synthetic peptide
AEIQKQGNDQW

SEQ ID NO: 21999 - protein, 9 aa, synthetic construct
  REGION 1..9: note = Description of Artificial Sequence: Synthetic peptide
SESAVRKAI

SEQ ID NO: 22000 - protein, 9 aa, synthetic construct
  REGION 1..9: note = Description of Artificial Sequence: Synthetic peptide
AELVVTTYW

SEQ ID NO: 22001 - protein, 9 aa, synthetic construct
  REGION 1..9: note = Description of Artificial Sequence: Synthetic peptide
SESDLVNQI

SEQ ID NO: 22002 - protein, 10 aa, synthetic construct
  REGION 1..10: note = Description of Artificial Sequence: Synthetic peptide
NETPGIRYQY

SEQ ID NO: 22003 - protein, 10 aa, synthetic construct
  REGION 1..10: note = Description of Artificial Sequence: Synthetic peptide
NETPGVRYQY

SEQ ID NO: 22004 - protein, 11 aa, synthetic construct
  REGION 1..11: note = Description of Artificial Sequence: Synthetic peptide
NEQDLLALDKW

SEQ ID NO: 22005 - protein, 9 aa, synthetic construct
  REGION 1..9: note = Description of Artificial Sequence: Synthetic peptide
SESELVNQI

SEQ ID NO: 22006 - protein, 9 aa, synthetic construct
  REGION 1..9: note = Description of Artificial Sequence: Synthetic peptide
SEIWENMTW

SEQ ID NO: 22007 - protein, 10 aa, synthetic construct
  REGION 1..10: note = Description of Artificial Sequence: Synthetic peptide
QEQGPPLTSL

SEQ ID NO: 22008 - protein, 10 aa, synthetic construct
  REGION 1..10: note = Description of Artificial Sequence: Synthetic peptide
VEMENVTENF

SEQ ID NO: 22009 - protein, 9 aa, synthetic construct
  REGION 1..9: note = Description of Artificial Sequence: Synthetic peptide
EEIWNNMTW

SEQ ID NO: 22010 - protein, 10 aa, synthetic construct
  REGION 1..10: note = Description of Artificial Sequence: Synthetic peptide
EEIKSLYNTI

SEQ ID NO: 22011 - protein, 11 aa, synthetic construct
  REGION 1..11: note = Description of Artificial Sequence: Synthetic peptide
AEIQKQGHGQW

SEQ ID NO: 22012 - protein, 9 aa, synthetic construct
  REGION 1..9: note = Description of Artificial Sequence: Synthetic peptide
AETGQETAY

SEQ ID NO: 22013 - protein, 9 aa, synthetic construct
  REGION 1..9: note = Description of Artificial Sequence: Synthetic peptide
TEMEKEGKI

SEQ ID NO: 22014 - protein, 8 aa, synthetic construct
  REGION 1..8: note = Description of Artificial Sequence: Synthetic peptide
AELVVTTY

SEQ ID NO: 22015 - protein, 9 aa, synthetic construct
  REGION 1..9: note = Description of Artificial Sequence: Synthetic peptide
DEHREVLKW

SEQ ID NO: 22016 - protein, 8 aa, synthetic construct
  REGION 1..8: note = Description of Artificial Sequence: Synthetic peptide
NETPGVRY

SEQ ID NO: 22017 - protein, 10 aa, synthetic construct
  REGION 1..10: note = Description of Artificial Sequence: Synthetic peptide
EEHEKYHNNW

SEQ ID NO: 22018 - protein, 10 aa, synthetic construct
  REGION 1..10: note = Description of Artificial Sequence: Synthetic peptide
AETGQETAYF

SEQ ID NO: 22019 - protein, 9 aa, synthetic construct
  REGION 1..9: note = Description of Artificial Sequence: Synthetic peptide
YEKEVHNVW

SEQ ID NO: 22020 - protein, 10 aa, synthetic construct
  REGION 1..10: note = Description of Artificial Sequence: Synthetic peptide
RETKQGKAGY

SEQ ID NO: 22021 - protein, 8 aa, synthetic construct
  REGION 1..8: note = Description of Artificial Sequence: Synthetic peptide
NETPGIRY

SEQ ID NO: 22022 - protein, 10 aa, synthetic construct
  REGION 1..10: note = Description of Artificial Sequence: Synthetic peptide
KEQSPPLTSL

SEQ ID NO: 22023 - protein, 9 aa, synthetic construct
  REGION 1..9: note = Description of Artificial Sequence: Synthetic peptide
YESNPYPNL

SEQ ID NO: 22024 - protein, 9 aa, synthetic construct
  REGION 1..9: note = Description of Artificial Sequence: Synthetic peptide
TEVVQKVAM

SEQ ID NO: 22025 - protein, 10 aa, synthetic construct
  REGION 1..10: note = Description of Artificial Sequence: Synthetic peptide
QEQGPPLTSL

SEQ ID NO: 22026 - protein, 11 aa, synthetic construct
  REGION 1..11: note = Description of Artificial Sequence: Synthetic peptide
AEIQKQGNDQW

SEQ ID NO: 22027 - protein, 10 aa, synthetic construct
  REGION 1..10: note = Description of Artificial Sequence: Synthetic peptide
KEQSPPLTSL

SEQ ID NO: 22028 - protein, 11 aa, synthetic construct
  REGION 1..11: note = Description of Artificial Sequence: Synthetic peptide
QEIKNSAINLL

SEQ ID NO: 22029 - protein, 10 aa, synthetic construct
  REGION 1..10: note = Description of Artificial Sequence: Synthetic peptide
EEIKSLYNTI

SEQ ID NO: 22030 - protein, 11 aa, synthetic construct
  REGION 1..11: note = Description of Artificial Sequence: Synthetic peptide
AEQATQEVKNW

SEQ ID NO: 22031 - protein, 10 aa, synthetic construct
  REGION 1..10: note = Description of Artificial Sequence: Synthetic peptide
VEMENVTENF

SEQ ID NO: 22032 - protein, 9 aa, synthetic construct
  REGION 1..9: note = Description of Artificial Sequence: Synthetic peptide
TEVVQKVAM

SEQ ID NO: 22033 - protein, 11 aa, synthetic construct
  REGION 1..11: note = Description of Artificial Sequence: Synthetic peptide
SEVNIVTDSQY

SEQ ID NO: 22034 - protein, 10 aa, synthetic construct
  REGION 1..10: note = Description of Artificial Sequence: Synthetic peptide
AETGQETAYF

SEQ ID NO: 22035 - protein, 9 aa, synthetic construct
  REGION 1..9: note = Description of Artificial Sequence: Synthetic peptide
EEINLPGKW

SEQ ID NO: 22036 - protein, 10 aa, synthetic construct
  REGION 1..10: note = Description of Artificial Sequence: Synthetic peptide
TETTNQKTEL

SEQ ID NO: 22037 - protein, 10 aa, synthetic construct
  REGION 1..10: note = Description of Artificial Sequence: Synthetic peptide
TETTNQKAEL

SEQ ID NO: 22038 - protein, 10 aa, synthetic construct
  REGION 1..10: note = Description of Artificial Sequence: Synthetic peptide
QEIKNSAINL

SEQ ID NO: 22039 - protein, 9 aa, synthetic construct
  REGION 1..9: note = Description of Artificial Sequence: Synthetic peptide
YETEVHNVW

SEQ ID NO: 22040 - protein, 10 aa, synthetic construct
  REGION 1..10: note = Description of Artificial Sequence: Synthetic peptide
KEISNHTSTI

SEQ ID NO: 22041 - protein, 9 aa, synthetic construct
  REGION 1..9: note = Description of Artificial Sequence: Synthetic peptide
SESDLVNQI

SEQ ID NO: 22042 - protein, 9 aa, synthetic construct
  REGION 1..9: note = Description of Artificial Sequence: Synthetic peptide
SESAIRKAL

SEQ ID NO: 22043 - protein, 10 aa, synthetic construct
  REGION 1..10: note = Description of Artificial Sequence: Synthetic peptide
TEPIVGAETF

SEQ ID NO: 22044 - protein, 10 aa, synthetic construct
  REGION 1..10: note = Description of Artificial Sequence: Synthetic peptide
NERSGTGSSF

SEQ ID NO: 22045 - protein, 11 aa, synthetic construct
  REGION 1..11: note = Description of Artificial Sequence: Synthetic peptide
AELELAENREI

SEQ ID NO: 22046 - protein, 9 aa, synthetic construct
  REGION 1..9: note = Description of Artificial Sequence: Synthetic peptide
YESNPYPNL

SEQ ID NO: 22047 - protein, 10 aa, synthetic construct
  REGION 1..10: note = Description of Artificial Sequence: Synthetic peptide
AEHLKTAVQM

SEQ ID NO: 22048 - protein, 9 aa, synthetic construct
  REGION 1..9: note = Description of Artificial Sequence: Synthetic peptide
TEMEKEGKI

SEQ ID NO: 22049 - protein, 9 aa, synthetic construct
  REGION 1..9: note = Description of Artificial Sequence: Synthetic peptide
SESELVNQI

SEQ ID NO: 22050 - protein, 10 aa, synthetic construct
  REGION 1..10: note = Description of Artificial Sequence: Synthetic peptide
QELKNSAISL

SEQ ID NO: 22051 - protein, 10 aa, synthetic construct
  REGION 1..10: note = Description of Artificial Sequence: Synthetic peptide
AEGTDRIIEI

SEQ ID NO: 22052 - protein, 9 aa, synthetic construct
  REGION 1..9: note = Description of Artificial Sequence: Synthetic peptide
MEDEHREVL

SEQ ID NO: 22053 - protein, 10 aa, synthetic construct
  REGION 1..10: note = Description of Artificial Sequence: Synthetic peptide
EEIIIRSENI

SEQ ID NO: 22054 - protein, 9 aa, synthetic construct
  REGION 1..9: note = Description of Artificial Sequence: Synthetic peptide
SESAVRKAI

SEQ ID NO: 22055 - protein, 9 aa, synthetic construct
  REGION 1..9: note = Description of Artificial Sequence: Synthetic peptide
SEGATPQDL

SEQ ID NO: 22056 - protein, 11 aa, synthetic construct
  REGION 1..11: note = Description of Artificial Sequence: Synthetic peptide
AEIQKQGHGQW

SEQ ID NO: 22057 - protein, 10 aa, synthetic construct
  REGION 1..10: note = Description of Artificial Sequence: Synthetic peptide
KEIGNYSDTI

SEQ ID NO: 22058 - protein, 11 aa, synthetic construct
  REGION 1..11: note = Description of Artificial Sequence: Synthetic peptide
SELVNQIIEQL

SEQ ID NO: 22059 - protein, 11 aa, synthetic construct
  REGION 1..11: note = Description of Artificial Sequence: Synthetic peptide
NETGENGTITL

SEQ ID NO: 22060 - protein, 9 aa, synthetic construct
  REGION 1..9: note = Description of Artificial Sequence: Synthetic peptide
QEKNEQDLL

SEQ ID NO: 22061 - protein, 8 aa, synthetic construct
  REGION 1..8: note = Description of Artificial Sequence: Synthetic peptide
AELQAICL

SEQ ID NO: 22062 - protein, 11 aa, synthetic construct
  REGION 1..11: note = Description of Artificial Sequence: Synthetic peptide
SEQQLLTPVRI

SEQ ID NO: 22063 - protein, 10 aa, synthetic construct
  REGION 1..10: note = Description of Artificial Sequence: Synthetic peptide
EEIIIRSEDI

SEQ ID NO: 22064 - protein, 9 aa, synthetic construct
  REGION 1..9: note = Description of Artificial Sequence: Synthetic peptide
AELVVTTYW

SEQ ID NO: 22065 - protein, 11 aa, synthetic construct
  REGION 1..11: note = Description of Artificial Sequence: Synthetic peptide
QELKNSAISLL

SEQ ID NO: 22066 - protein, 10 aa, synthetic construct
  REGION 1..10: note = Description of Artificial Sequence: Synthetic peptide
IEAQQQMLQL

SEQ ID NO: 22067 - protein, 10 aa, synthetic construct
  REGION 1..10: note = Description of Artificial Sequence: Synthetic peptide
TEGGLGSPQI

SEQ ID NO: 22068 - protein, 9 aa, synthetic construct
  REGION 1..9: note = Description of Artificial Sequence: Synthetic peptide
ISNHTSTIY

SEQ ID NO: 22069 - protein, 10 aa, synthetic construct
  REGION 1..10: note = Description of Artificial Sequence: Synthetic peptide
ILKEPVHGVY

SEQ ID NO: 22070 - protein, 9 aa, synthetic construct
  REGION 1..9: note = Description of Artificial Sequence: Synthetic peptide
GQKAIGTVL

SEQ ID NO: 22071 - protein, 8 aa, synthetic construct
  REGION 1..8: note = Description of Artificial Sequence: Synthetic peptide
GQMVHQAL

SEQ ID NO: 22072 - protein, 9 aa, synthetic construct
  REGION 1..9: note = Description of Artificial Sequence: Synthetic peptide
SQVTNPVVM

SEQ ID NO: 22073 - protein, 9 aa, synthetic construct
  REGION 1..9: note = Description of Artificial Sequence: Synthetic peptide
KALGPGASL

SEQ ID NO: 22074 - protein, 8 aa, synthetic construct
  REGION 1..8: note = Description of Artificial Sequence: Synthetic peptide
HQAAMQML

SEQ ID NO: 22075 - protein, 9 aa, synthetic construct
  REGION 1..9: note = Description of Artificial Sequence: Synthetic peptide
IKPVVSTQL

SEQ ID NO: 22076 - protein, 9 aa, synthetic construct
  REGION 1..9: note = Description of Artificial Sequence: Synthetic peptide
KALGSGATL

SEQ ID NO: 22077 - protein, 9 aa, synthetic construct
  REGION 1..9: note = Description of Artificial Sequence: Synthetic peptide
RAIEAQQHL

SEQ ID NO: 22078 - protein, 10 aa, synthetic construct
  REGION 1..10: note = Description of Artificial Sequence: Synthetic peptide
SLFGNDPLSQ

SEQ ID NO: 22079 - protein, 9 aa, synthetic construct
  REGION 1..9: note = Description of Artificial Sequence: Synthetic peptide
EQSPPLTSL

SEQ ID NO: 22080 - protein, 11 aa, synthetic construct
  REGION 1..11: note = Description of Artificial Sequence: Synthetic peptide
GHLILGNIDNL

SEQ ID NO: 22081 - protein, 9 aa, synthetic construct
  REGION 1..9: note = Description of Artificial Sequence: Synthetic peptide
TQVGSLQYL

SEQ ID NO: 22082 - protein, 8 aa, synthetic construct
  REGION 1..8: note = Description of Artificial Sequence: Synthetic peptide
YETEVHNV

SEQ ID NO: 22083 - protein, 9 aa, synthetic construct
  REGION 1..9: note = Description of Artificial Sequence: Synthetic peptide
SESDLVNQI

SEQ ID NO: 22084 - protein, 9 aa, synthetic construct
  REGION 1..9: note = Description of Artificial Sequence: Synthetic peptide
SESELVNQI

SEQ ID NO: 22085 - protein, 10 aa, synthetic construct
  REGION 1..10: note = Description of Artificial Sequence: Synthetic peptide
CEYQAGHTQV

SEQ ID NO: 22086 - protein, 10 aa, synthetic construct
  REGION 1..10: note = Description of Artificial Sequence: Synthetic peptide
KEISNHTSTI

SEQ ID NO: 22087 - protein, 9 aa, synthetic construct
  REGION 1..9: note = Description of Artificial Sequence: Synthetic peptide
YESNPYPNL

SEQ ID NO: 22088 - protein, 9 aa, synthetic construct
  REGION 1..9: note = Description of Artificial Sequence: Synthetic peptide
TEMEKEGKI

SEQ ID NO: 22089 - protein, 10 aa, synthetic construct
  REGION 1..10: note = Description of Artificial Sequence: Synthetic peptide
TEPSFNFPQI

SEQ ID NO: 22090 - protein, 10 aa, synthetic construct
  REGION 1..10: note = Description of Artificial Sequence: Synthetic peptide
KEIGNYSDTI

SEQ ID NO: 22091 - protein, 10 aa, synthetic construct
  REGION 1..10: note = Description of Artificial Sequence: Synthetic peptide
EEIKSLYNTI

SEQ ID NO: 22092 - protein, 9 aa, synthetic construct
  REGION 1..9: note = Description of Artificial Sequence: Synthetic peptide
VEQMHTDII

SEQ ID NO: 22093 - protein, 8 aa, synthetic construct
  REGION 1..8: note = Description of Artificial Sequence: Synthetic peptide
EEDTTITI

SEQ ID NO: 22094 - protein, 10 aa, synthetic construct
  REGION 1..10: note = Description of Artificial Sequence: Synthetic peptide
QEQGPPLTSL

SEQ ID NO: 22095 - protein, 8 aa, synthetic construct
  REGION 1..8: note = Description of Artificial Sequence: Synthetic peptide
GELGSPQI

SEQ ID NO: 22096 - protein, 8 aa, synthetic construct
  REGION 1..8: note = Description of Artificial Sequence: Synthetic peptide
GEAIHGQV

SEQ ID NO: 22097 - protein, 10 aa, synthetic construct
  REGION 1..10: note = Description of Artificial Sequence: Synthetic peptide
AESFGFGEKI

SEQ ID NO: 22098 - protein, 9 aa, synthetic construct
  REGION 1..9: note = Description of Artificial Sequence: Synthetic peptide
EEEDTTITI

SEQ ID NO: 22099 - protein, 11 aa, synthetic construct
  REGION 1..11: note = Description of Artificial Sequence: Synthetic peptide
SEELRSLFNTV

SEQ ID NO: 22100 - protein, 11 aa, synthetic construct
  REGION 1..11: note = Description of Artificial Sequence: Synthetic peptide
AELELAENREI

SEQ ID NO: 22101 - protein, 8 aa, synthetic construct
  REGION 1..8: note = Description of Artificial Sequence: Synthetic peptide
QEIKNSAI

SEQ ID NO: 22102 - protein, 9 aa, synthetic construct
  REGION 1..9: note = Description of Artificial Sequence: Synthetic peptide
IEICGQKAI

SEQ ID NO: 22103 - protein, 10 aa, synthetic construct
  REGION 1..10: note = Description of Artificial Sequence: Synthetic peptide
EELRSLFNTV

SEQ ID NO: 22104 - protein, 9 aa, synthetic construct
  REGION 1..9: note = Description of Artificial Sequence: Synthetic peptide
YETEVHNVW

SEQ ID NO: 22105 - protein, 8 aa, synthetic construct
  REGION 1..8: note = Description of Artificial Sequence: Synthetic peptide
YEKEVHNV

SEQ ID NO: 22106 - protein, 9 aa, synthetic construct
  REGION 1..9: note = Description of Artificial Sequence: Synthetic peptide
AEWDRMHPV

SEQ ID NO: 22107 - protein, 10 aa, synthetic construct
  REGION 1..10: note = Description of Artificial Sequence: Synthetic peptide
SESDLVNQII

SEQ ID NO: 22108 - protein, 10 aa, synthetic construct
  REGION 1..10: note = Description of Artificial Sequence: Synthetic peptide
AESFGFGEEI

SEQ ID NO: 22109 - protein, 9 aa, synthetic construct
  REGION 1..9: note = Description of Artificial Sequence: Synthetic peptide
MEICGQKAI

SEQ ID NO: 22110 - protein, 9 aa, synthetic construct
  REGION 1..9: note = Description of Artificial Sequence: Synthetic peptide
IEVKDTKEA

SEQ ID NO: 22111 - protein, 9 aa, synthetic construct
  REGION 1..9: note = Description of Artificial Sequence: Synthetic peptide
LETEPIVGA

SEQ ID NO: 22112 - protein, 11 aa, synthetic construct
  REGION 1..11: note = Description of Artificial Sequence: Synthetic peptide
AEAMSQVTNSA

SEQ ID NO: 22113 - protein, 9 aa, synthetic construct
  REGION 1..9: note = Description of Artificial Sequence: Synthetic peptide
AETFYVDGA

SEQ ID NO: 22114 - protein, 10 aa, synthetic construct
  REGION 1..10: note = Description of Artificial Sequence: Synthetic peptide
REFSSEQTRA

SEQ ID NO: 22115 - protein, 9 aa, synthetic construct
  REGION 1..9: note = Description of Artificial Sequence: Synthetic peptide
LILGDINNL

SEQ ID NO: 22116 - protein, 9 aa, synthetic construct
  REGION 1..9: note = Description of Artificial Sequence: Synthetic peptide
ASITLTVQA

SEQ ID NO: 22117 - protein, 9 aa, synthetic construct
  REGION 1..9: note = Description of Artificial Sequence: Synthetic peptide
TETLLVQNA

SEQ ID NO: 22118 - protein, 9 aa, synthetic construct
  REGION 1..9: note = Description of Artificial Sequence: Synthetic peptide
LILGNIDNL

SEQ ID NO: 22119 - protein, 10 aa, synthetic construct
  REGION 1..10: note = Description of Artificial Sequence: Synthetic peptide
AETFYVDGAA

SEQ ID NO: 22120 - protein, 9 aa, synthetic construct
  REGION 1..9: note = Description of Artificial Sequence: Synthetic peptide
ATLEEMMTA

SEQ ID NO: 22121 - protein, 8 aa, synthetic construct
  REGION 1..8: note = Description of Artificial Sequence: Synthetic peptide
TEVVQKVA

SEQ ID NO: 22122 - protein, 9 aa, synthetic construct
  REGION 1..9: note = Description of Artificial Sequence: Synthetic peptide
TQVGSLQYL

SEQ ID NO: 22123 - protein, 9 aa, synthetic construct
  REGION 1..9: note = Description of Artificial Sequence: Synthetic peptide
GENGTITLP

SEQ ID NO: 22124 - protein, 11 aa, synthetic construct
  REGION 1..11: note = Description of Artificial Sequence: Synthetic peptide
TQVEPDLADQL

SEQ ID NO: 22125 - protein, 10 aa, synthetic construct
  REGION 1..10: note = Description of Artificial Sequence: Synthetic peptide
REQAEHLKTA

SEQ ID NO: 22126 - protein, 9 aa, synthetic construct
  REGION 1..9: note = Description of Artificial Sequence: Synthetic peptide
QLTEVVQKV

SEQ ID NO: 22127 - protein, 9 aa, synthetic construct
  REGION 1..9: note = Description of Artificial Sequence: Synthetic peptide
EEVGFPVRP

SEQ ID NO: 22128 - protein, 9 aa, synthetic construct
  REGION 1..9: note = Description of Artificial Sequence: Synthetic peptide
ALFLGFLGA

SEQ ID NO: 22129 - protein, 11 aa, synthetic construct
  REGION 1..11: note = Description of Artificial Sequence: Synthetic peptide
REVLASQQREA

SEQ ID NO: 22130 - protein, 8 aa, synthetic construct
  REGION 1..8: note = Description of Artificial Sequence: Synthetic peptide
TAFTIPSI

SEQ ID NO: 22131 - protein, 9 aa, synthetic construct
  REGION 1..9: note = Description of Artificial Sequence: Synthetic peptide
FPISPIETV

SEQ ID NO: 22132 - protein, 9 aa, synthetic construct
  REGION 1..9: note = Description of Artificial Sequence: Synthetic peptide
DAKAYETEV

SEQ ID NO: 22133 - protein, 8 aa, synthetic construct
  REGION 1..8: note = Description of Artificial Sequence: Synthetic peptide
VPLTVGII

SEQ ID NO: 22134 - protein, 8 aa, synthetic construct
  REGION 1..8: note = Description of Artificial Sequence: Synthetic peptide
IAFAVLSV

SEQ ID NO: 22135 - protein, 10 aa, synthetic construct
  REGION 1..10: note = Description of Artificial Sequence: Synthetic peptide
IPYNPQSQGV

SEQ ID NO: 22136 - protein, 9 aa, synthetic construct
  REGION 1..9: note = Description of Artificial Sequence: Synthetic peptide
YAPPIAGSI

SEQ ID NO: 22137 - protein, 8 aa, synthetic construct
  REGION 1..8: note = Description of Artificial Sequence: Synthetic peptide
VPVDPREV

SEQ ID NO: 22138 - protein, 8 aa, synthetic construct
  REGION 1..8: note = Description of Artificial Sequence: Synthetic peptide
TPVRIIKI

SEQ ID NO: 22139 - protein, 8 aa, synthetic construct
  REGION 1..8: note = Description of Artificial Sequence: Synthetic peptide
VALVVALI

SEQ ID NO: 22140 - protein, 9 aa, synthetic construct
  REGION 1..9: note = Description of Artificial Sequence: Synthetic peptide
LPPVVAKEI

SEQ ID NO: 22141 - protein, 9 aa, synthetic construct
  REGION 1..9: note = Description of Artificial Sequence: Synthetic peptide
SPLSFQTLI

SEQ ID NO: 22142 - protein, 9 aa, synthetic construct
  REGION 1..9: note = Description of Artificial Sequence: Synthetic peptide
LPPIVAKEI

SEQ ID NO: 22143 - protein, 8 aa, synthetic construct
  REGION 1..8: note = Description of Artificial Sequence: Synthetic peptide
DSWTVNDI

SEQ ID NO: 22144 - protein, 9 aa, synthetic construct
  REGION 1..9: note = Description of Artificial Sequence: Synthetic peptide
DAKAYEKEV

SEQ ID NO: 22145 - protein, 8 aa, synthetic construct
  REGION 1..8: note = Description of Artificial Sequence: Synthetic peptide
NPYNTPVF

SEQ ID NO: 22146 - protein, 8 aa, synthetic construct
  REGION 1..8: note = Description of Artificial Sequence: Synthetic peptide
DPQVTRHI

SEQ ID NO: 22147 - protein, 8 aa, synthetic construct
  REGION 1..8: note = Description of Artificial Sequence: Synthetic peptide
VAALILAI

SEQ ID NO: 22148 - protein, 9 aa, synthetic construct
  REGION 1..9: note = Description of Artificial Sequence: Synthetic peptide
NPPVPVGEI

SEQ ID NO: 22149 - protein, 9 aa, synthetic construct
  REGION 1..9: note = Description of Artificial Sequence: Synthetic peptide
YAPPTAGNI

SEQ ID NO: 22150 - protein, 9 aa, synthetic construct
  REGION 1..9: note = Description of Artificial Sequence: Synthetic peptide
RPKPPVPSV

SEQ ID NO: 22151 - protein, 8 aa, synthetic construct
  REGION 1..8: note = Description of Artificial Sequence: Synthetic peptide
TAYFILKL

SEQ ID NO: 22152 - protein, 8 aa, synthetic construct
  REGION 1..8: note = Description of Artificial Sequence: Synthetic peptide
APPIAGSI

SEQ ID NO: 22153 - protein, 9 aa, synthetic construct
  REGION 1..9: note = Description of Artificial Sequence: Synthetic peptide
NPPIPVGEI

SEQ ID NO: 22154 - protein, 8 aa, synthetic construct
  REGION 1..8: note = Description of Artificial Sequence: Synthetic peptide
IATEGIVI

SEQ ID NO: 22155 - protein, 9 aa, synthetic construct
  REGION 1..9: note = Description of Artificial Sequence: Synthetic peptide
IAFAVLSVV

SEQ ID NO: 22156 - protein, 8 aa, synthetic construct
  REGION 1..8: note = Description of Artificial Sequence: Synthetic peptide
VPVDPAEV

SEQ ID NO: 22157 - protein, 11 aa, synthetic construct
  REGION 1..11: note = Description of Artificial Sequence: Synthetic peptide
IPYNPQSQGVV

SEQ ID NO: 22158 - protein, 8 aa, synthetic construct
  REGION 1..8: note = Description of Artificial Sequence: Synthetic peptide
SPVSILDI

SEQ ID NO: 22159 - protein, 9 aa, synthetic construct
  REGION 1..9: note = Description of Artificial Sequence: Synthetic peptide
FPISPIETV

SEQ ID NO: 22160 - protein, 9 aa, synthetic construct
  REGION 1..9: note = Description of Artificial Sequence: Synthetic peptide
VPLTVGIIA

SEQ ID NO: 22161 - protein, 9 aa, synthetic construct
  REGION 1..9: note = Description of Artificial Sequence: Synthetic peptide
IPKQPLPQA

SEQ ID NO: 22162 - protein, 9 aa, synthetic construct
  REGION 1..9: note = Description of Artificial Sequence: Synthetic peptide
EPIPIHYCA

SEQ ID NO: 22163 - protein, 9 aa, synthetic construct
  REGION 1..9: note = Description of Artificial Sequence: Synthetic peptide
HVASGYIEA

SEQ ID NO: 22164 - protein, 9 aa, synthetic construct
  REGION 1..9: note = Description of Artificial Sequence: Synthetic peptide
RPKPPVPSV

SEQ ID NO: 22165 - protein, 9 aa, synthetic construct
  REGION 1..9: note = Description of Artificial Sequence: Synthetic peptide
QAIYAPPTA

SEQ ID NO: 22166 - protein, 10 aa, synthetic construct
  REGION 1..10: note = Description of Artificial Sequence: Synthetic peptide
EPLGIAPTRA

SEQ ID NO: 22167 - protein, 9 aa, synthetic construct
  REGION 1..9: note = Description of Artificial Sequence: Synthetic peptide
EATPTLFCA

SEQ ID NO: 22168 - protein, 10 aa, synthetic construct
  REGION 1..10: note = Description of Artificial Sequence: Synthetic peptide
YPKPEGTRQA

SEQ ID NO: 22169 - protein, 9 aa, synthetic construct
  REGION 1..9: note = Description of Artificial Sequence: Synthetic peptide
NPYNTPVFA

SEQ ID NO: 22170 - protein, 11 aa, synthetic construct
  REGION 1..11: note = Description of Artificial Sequence: Synthetic peptide
VPVDPREVEEA

SEQ ID NO: 22171 - protein, 8 aa, synthetic construct
  REGION 1..8: note = Description of Artificial Sequence: Synthetic peptide
TAFTIPSI

SEQ ID NO: 22172 - protein, 11 aa, synthetic construct
  REGION 1..11: note = Description of Artificial Sequence: Synthetic peptide
LPPVVAKEIVA

SEQ ID NO: 22173 - protein, 11 aa, synthetic construct
  REGION 1..11: note = Description of Artificial Sequence: Synthetic peptide
FPISPIETVPV

SEQ ID NO: 22174 - protein, 11 aa, synthetic construct
  REGION 1..11: note = Description of Artificial Sequence: Synthetic peptide
MLNTVGGHQAA

SEQ ID NO: 22175 - protein, 10 aa, synthetic construct
  REGION 1..10: note = Description of Artificial Sequence: Synthetic peptide
EAMSQVTNSA

SEQ ID NO: 22176 - protein, 9 aa, synthetic construct
  REGION 1..9: note = Description of Artificial Sequence: Synthetic peptide
EATTTLFCA

SEQ ID NO: 22177 - protein, 9 aa, synthetic construct
  REGION 1..9: note = Description of Artificial Sequence: Synthetic peptide
HPVHAGPIP

SEQ ID NO: 22178 - protein, 10 aa, synthetic construct
  REGION 1..10: note = Description of Artificial Sequence: Synthetic peptide
HPVHAGPIPP

SEQ ID NO: 22179 - protein, 9 aa, synthetic construct
  REGION 1..9: note = Description of Artificial Sequence: Synthetic peptide
RPKPPVPSV

SEQ ID NO: 22180 - protein, 9 aa, synthetic construct
  REGION 1..9: note = Description of Artificial Sequence: Synthetic peptide
IPKQPLPQA

SEQ ID NO: 22181 - protein, 10 aa, synthetic construct
  REGION 1..10: note = Description of Artificial Sequence: Synthetic peptide
YPKPEGTRQA

SEQ ID NO: 22182 - protein, 9 aa, synthetic construct
  REGION 1..9: note = Description of Artificial Sequence: Synthetic peptide
FPISPIETV

SEQ ID NO: 22183 - protein, 9 aa, synthetic construct
  REGION 1..9: note = Description of Artificial Sequence: Synthetic peptide
RPEPTAPPA

SEQ ID NO: 22184 - protein, 9 aa, synthetic construct
  REGION 1..9: note = Description of Artificial Sequence: Synthetic peptide
VPLTVGIIA

SEQ ID NO: 22185 - protein, 9 aa, synthetic construct
  REGION 1..9: note = Description of Artificial Sequence: Synthetic peptide
IPKQPLPQA

SEQ ID NO: 22186 - protein, 9 aa, synthetic construct
  REGION 1..9: note = Description of Artificial Sequence: Synthetic peptide
RPKPPVPSV

SEQ ID NO: 22187 - protein, 9 aa, synthetic construct
  REGION 1..9: note = Description of Artificial Sequence: Synthetic peptide
FPISPIETV

SEQ ID NO: 22188 - protein, 9 aa, synthetic construct
  REGION 1..9: note = Description of Artificial Sequence: Synthetic peptide
VPLTVGIIA

SEQ ID NO: 22189 - protein, 10 aa, synthetic construct
  REGION 1..10: note = Description of Artificial Sequence: Synthetic peptide
RPVVTVKVGG

SEQ ID NO: 22190 - protein, 10 aa, synthetic construct
  REGION 1..10: note = Description of Artificial Sequence: Synthetic peptide
IPAETGQETA

SEQ ID NO: 22191 - protein, 9 aa, synthetic construct
  REGION 1..9: note = Description of Artificial Sequence: Synthetic peptide
NPYNTPVFA

SEQ ID NO: 22192 - protein, 9 aa, synthetic construct
  REGION 1..9: note = Description of Artificial Sequence: Synthetic peptide
RPEPTAPPA

SEQ ID NO: 22193 - protein, 10 aa, synthetic construct
  REGION 1..10: note = Description of Artificial Sequence: Synthetic peptide
YPKPEGTRQA

SEQ ID NO: 22194 - protein, 10 aa, synthetic construct
  REGION 1..10: note = Description of Artificial Sequence: Synthetic peptide
IPYNPQSQGV

SEQ ID NO: 22195 - protein, 9 aa, synthetic construct
  REGION 1..9: note = Description of Artificial Sequence: Synthetic peptide
RPKPPVPSV

SEQ ID NO: 22196 - protein, 9 aa, synthetic construct
  REGION 1..9: note = Description of Artificial Sequence: Synthetic peptide
IPKQPLPQA

SEQ ID NO: 22197 - protein, 9 aa, synthetic construct
  REGION 1..9: note = Description of Artificial Sequence: Synthetic peptide
FPISPIETV

SEQ ID NO: 22198 - protein, 10 aa, synthetic construct
  REGION 1..10: note = Description of Artificial Sequence: Synthetic peptide
RPVVTVKVGG

SEQ ID NO: 22199 - protein, 9 aa, synthetic construct
  REGION 1..9: note = Description of Artificial Sequence: Synthetic peptide
VPLTVGIIA

SEQ ID NO: 22200 - protein, 10 aa, synthetic construct
  REGION 1..10: note = Description of Artificial Sequence: Synthetic peptide
IPYNPQSQGV

SEQ ID NO: 22201 - protein, 10 aa, synthetic construct
  REGION 1..10: note = Description of Artificial Sequence: Synthetic peptide
APAGFAILKC

SEQ ID NO: 22202 - protein, 11 aa, synthetic construct
  REGION 1..11: note = Description of Artificial Sequence: Synthetic peptide
VPVDPREVEEA

SEQ ID NO: 22203 - protein, 10 aa, synthetic construct
  REGION 1..10: note = Description of Artificial Sequence: Synthetic peptide
IPAETGQETA

SEQ ID NO: 22204 - protein, 10 aa, synthetic construct
  REGION 1..10: note = Description of Artificial Sequence: Synthetic peptide
YPKPEGTRQA

SEQ ID NO: 22205 - protein, 9 aa, synthetic construct
  REGION 1..9: note = Description of Artificial Sequence: Synthetic peptide
RPEPTAPPA

SEQ ID NO: 22206 - protein, 10 aa, synthetic construct
  REGION 1..10: note = Description of Artificial Sequence: Synthetic peptide
SPEVIPMFSA

SEQ ID NO: 22207 - protein, 9 aa, synthetic construct
  REGION 1..9: note = Description of Artificial Sequence: Synthetic peptide
QAIYAPPTA

SEQ ID NO: 22208 - protein, 9 aa, synthetic construct
  REGION 1..9: note = Description of Artificial Sequence: Synthetic peptide
NPYPKPEGT

SEQ ID NO: 22209 - protein, 9 aa, synthetic construct
  REGION 1..9: note = Description of Artificial Sequence: Synthetic peptide
RPAADRVGT

SEQ ID NO: 22210 - protein, 11 aa, synthetic construct
  REGION 1..11: note = Description of Artificial Sequence: Synthetic peptide
KAYETEVHNVW

SEQ ID NO: 22211 - protein, 9 aa, synthetic construct
  REGION 1..9: note = Description of Artificial Sequence: Synthetic peptide
STLQEQITW

SEQ ID NO: 22212 - protein, 9 aa, synthetic construct
  REGION 1..9: note = Description of Artificial Sequence: Synthetic peptide
RAREIQRNW

SEQ ID NO: 22213 - protein, 11 aa, synthetic construct
  REGION 1..11: note = Description of Artificial Sequence: Synthetic peptide
KAYEKEVHNVW

SEQ ID NO: 22214 - protein, 11 aa, synthetic construct
  REGION 1..11: note = Description of Artificial Sequence: Synthetic peptide
RANSPTSRELW

SEQ ID NO: 22215 - protein, 10 aa, synthetic construct
  REGION 1..10: note = Description of Artificial Sequence: Synthetic peptide
TTNVPWNSSW

SEQ ID NO: 22216 - protein, 10 aa, synthetic construct
  REGION 1..10: note = Description of Artificial Sequence: Synthetic peptide
KIATEGIVIW

SEQ ID NO: 22217 - protein, 9 aa, synthetic construct
  REGION 1..9: note = Description of Artificial Sequence: Synthetic peptide
RIKQIINMW

SEQ ID NO: 22218 - protein, 11 aa, synthetic construct
  REGION 1..11: note = Description of Artificial Sequence: Synthetic peptide
TTSTLQEQITW

SEQ ID NO: 22219 - protein, 9 aa, synthetic construct
  REGION 1..9: note = Description of Artificial Sequence: Synthetic peptide
STLQEQIAW

SEQ ID NO: 22220 - protein, 11 aa, synthetic construct
  REGION 1..11: note = Description of Artificial Sequence: Synthetic peptide
LAFPQGEAREF

SEQ ID NO: 22221 - protein, 10 aa, synthetic construct
  REGION 1..10: note = Description of Artificial Sequence: Synthetic peptide
VTVYYGVPVW

SEQ ID NO: 22222 - protein, 9 aa, synthetic construct
  REGION 1..9: note = Description of Artificial Sequence: Synthetic peptide
KTKPPVPSV

SEQ ID NO: 22223 - protein, 11 aa, synthetic construct
  REGION 1..11: note = Description of Artificial Sequence: Synthetic peptide
SSFNFPQITLW

SEQ ID NO: 22224 - protein, 10 aa, synthetic construct
  REGION 1..10: note = Description of Artificial Sequence: Synthetic peptide
GSWEALKYLW

SEQ ID NO: 22225 - protein, 11 aa, synthetic construct
  REGION 1..11: note = Description of Artificial Sequence: Synthetic peptide
SVLSGGKLDAW

SEQ ID NO: 22226 - protein, 9 aa, synthetic construct
  REGION 1..9: note = Description of Artificial Sequence: Synthetic peptide
KTAVQMAVF

SEQ ID NO: 22227 - protein, 11 aa, synthetic construct
  REGION 1..11: note = Description of Artificial Sequence: Synthetic peptide
KSLYNTIAVLY

SEQ ID NO: 22228 - protein, 8 aa, synthetic construct
  REGION 1..8: note = Description of Artificial Sequence: Synthetic peptide
ISKKANRW

SEQ ID NO: 22229 - protein, 11 aa, synthetic construct
  REGION 1..11: note = Description of Artificial Sequence: Synthetic peptide
KSIHIGPGRAF

SEQ ID NO: 22230 - protein, 9 aa, synthetic construct
  REGION 1..9: note = Description of Artificial Sequence: Synthetic peptide
WSKSSIVGW

SEQ ID NO: 22231 - protein, 9 aa, synthetic construct
  REGION 1..9: note = Description of Artificial Sequence: Synthetic peptide
RAVGIGALF

SEQ ID NO: 22232 - protein, 9 aa, synthetic construct
  REGION 1..9: note = Description of Artificial Sequence: Synthetic peptide
HTSTIYRLI

SEQ ID NO: 22233 - protein, 9 aa, synthetic construct
  REGION 1..9: note = Description of Artificial Sequence: Synthetic peptide
RVRGMQRNW

SEQ ID NO: 22234 - protein, 9 aa, synthetic construct
  REGION 1..9: note = Description of Artificial Sequence: Synthetic peptide
RSVRLVSGF

SEQ ID NO: 22235 - protein, 9 aa, synthetic construct
  REGION 1..9: note = Description of Artificial Sequence: Synthetic peptide
STLQEQITW

SEQ ID NO: 22236 - protein, 9 aa, synthetic construct
  REGION 1..9: note = Description of Artificial Sequence: Synthetic peptide
RAIEAQQQM

SEQ ID NO: 22237 - protein, 9 aa, synthetic construct
  REGION 1..9: note = Description of Artificial Sequence: Synthetic peptide
RAIEAQQHL

SEQ ID NO: 22238 - protein, 9 aa, synthetic construct
  REGION 1..9: note = Description of Artificial Sequence: Synthetic peptide
STLQEQIAW

SEQ ID NO: 22239 - protein, 10 aa, synthetic construct
  REGION 1..10: note = Description of Artificial Sequence: Synthetic peptide
AADKGVSQNY

SEQ ID NO: 22240 - protein, 9 aa, synthetic construct
  REGION 1..9: note = Description of Artificial Sequence: Synthetic peptide
KVVSITETT

SEQ ID NO: 22241 - protein, 9 aa, synthetic construct
  REGION 1..9: note = Description of Artificial Sequence: Synthetic peptide
IITQIQPSI

SEQ ID NO: 22242 - protein, 9 aa, synthetic construct
  REGION 1..9: note = Description of Artificial Sequence: Synthetic peptide
GSEEIKSLY

SEQ ID NO: 22243 - protein, 9 aa, synthetic construct
  REGION 1..9: note = Description of Artificial Sequence: Synthetic peptide
RAVGIGALF

SEQ ID NO: 22244 - protein, 9 aa, synthetic construct
  REGION 1..9: note = Description of Artificial Sequence: Synthetic peptide
KVISITETT

SEQ ID NO: 22245 - protein, 9 aa, synthetic construct
  REGION 1..9: note = Description of Artificial Sequence: Synthetic peptide
KTAVQMAVF

SEQ ID NO: 22246 - protein, 10 aa, synthetic construct
  REGION 1..10: note = Description of Artificial Sequence: Synthetic peptide
KADKGVSQNY

SEQ ID NO: 22247 - protein, 10 aa, synthetic construct
  REGION 1..10: note = Description of Artificial Sequence: Synthetic peptide
RAIEAQQHLL

SEQ ID NO: 22248 - protein, 11 aa, synthetic construct
  REGION 1..11: note = Description of Artificial Sequence: Synthetic peptide
KAYETEVHNVW

SEQ ID NO: 22249 - protein, 9 aa, synthetic construct
  REGION 1..9: note = Description of Artificial Sequence: Synthetic peptide
RAVGLGAVF

SEQ ID NO: 22250 - protein, 8 aa, synthetic construct
  REGION 1..8: note = Description of Artificial Sequence: Synthetic peptide
GQGVSIEW

SEQ ID NO: 22251 - protein, 9 aa, synthetic construct
  REGION 1..9: note = Description of Artificial Sequence: Synthetic peptide
TINEEAAEW

SEQ ID NO: 22252 - protein, 9 aa, synthetic construct
  REGION 1..9: note = Description of Artificial Sequence: Synthetic peptide
KTKPPVPSV

SEQ ID NO: 22253 - protein, 8 aa, synthetic construct
  REGION 1..8: note = Description of Artificial Sequence: Synthetic peptide
NSPTSREL

SEQ ID NO: 22254 - protein, 9 aa, synthetic construct
  REGION 1..9: note = Description of Artificial Sequence: Synthetic peptide
YSPLSFQTL

SEQ ID NO: 22255 - protein, 9 aa, synthetic construct
  REGION 1..9: note = Description of Artificial Sequence: Synthetic peptide
YSPVSILDI

SEQ ID NO: 22256 - protein, 9 aa, synthetic construct
  REGION 1..9: note = Description of Artificial Sequence: Synthetic peptide
HTQVGSLQY

SEQ ID NO: 22257 - protein, 9 aa, synthetic construct
  REGION 1..9: note = Description of Artificial Sequence: Synthetic peptide
TEVVQKVAM

SEQ ID NO: 22258 - protein, 8 aa, synthetic construct
  REGION 1..8: note = Description of Artificial Sequence: Synthetic peptide
AELVVTTY

SEQ ID NO: 22259 - protein, 10 aa, synthetic construct
  REGION 1..10: note = Description of Artificial Sequence: Synthetic peptide
AADKGVSQNY

SEQ ID NO: 22260 - protein, 9 aa, synthetic construct
  REGION 1..9: note = Description of Artificial Sequence: Synthetic peptide
DAELVVTTY

SEQ ID NO: 22261 - protein, 9 aa, synthetic construct
  REGION 1..9: note = Description of Artificial Sequence: Synthetic peptide
GSEEIKSLY

SEQ ID NO: 22262 - protein, 8 aa, synthetic construct
  REGION 1..8: note = Description of Artificial Sequence: Synthetic peptide
VLDVGDAY

SEQ ID NO: 22263 - protein, 9 aa, synthetic construct
  REGION 1..9: note = Description of Artificial Sequence: Synthetic peptide
KALGPGASL

SEQ ID NO: 22264 - protein, 9 aa, synthetic construct
  REGION 1..9: note = Description of Artificial Sequence: Synthetic peptide
RAIEAQQHL

SEQ ID NO: 22265 - protein, 9 aa, synthetic construct
  REGION 1..9: note = Description of Artificial Sequence: Synthetic peptide
LALDKWASL

SEQ ID NO: 22266 - protein, 9 aa, synthetic construct
  REGION 1..9: note = Description of Artificial Sequence: Synthetic peptide
KALGSGATL

SEQ ID NO: 22267 - protein, 9 aa, synthetic construct
  REGION 1..9: note = Description of Artificial Sequence: Synthetic peptide
KALGPGASL

SEQ ID NO: 22268 - protein, 9 aa, synthetic construct
  REGION 1..9: note = Description of Artificial Sequence: Synthetic peptide
RAIEAQQHL

SEQ ID NO: 22269 - protein, 9 aa, synthetic construct
  REGION 1..9: note = Description of Artificial Sequence: Synthetic peptide
KALGSGATL

SEQ ID NO: 22270 - protein, 9 aa, synthetic construct
  REGION 1..9: note = Description of Artificial Sequence: Synthetic peptide
ATDIQTKEL

SEQ ID NO: 22271 - protein, 9 aa, synthetic construct
  REGION 1..9: note = Description of Artificial Sequence: Synthetic peptide
YVDRFFKTL

SEQ ID NO: 22272 - protein, 9 aa, synthetic construct
  REGION 1..9: note = Description of Artificial Sequence: Synthetic peptide
SAEPVPLQL

SEQ ID NO: 22273 - protein, 8 aa, synthetic construct
  REGION 1..8: note = Description of Artificial Sequence: Synthetic peptide
HTDNGTNF

SEQ ID NO: 22274 - protein, 9 aa, synthetic construct
  REGION 1..9: note = Description of Artificial Sequence: Synthetic peptide
QYDQVLIEI

SEQ ID NO: 22275 - protein, 8 aa, synthetic construct
  REGION 1..8: note = Description of Artificial Sequence: Synthetic peptide
HTDNGTNF

SEQ ID NO: 22276 - protein, 8 aa, synthetic construct
  REGION 1..8: note = Description of Artificial Sequence: Synthetic peptide
HTDNGSNF

SEQ ID NO: 22277 - protein, 9 aa, synthetic construct
  REGION 1..9: note = Description of Artificial Sequence: Synthetic peptide
SAEPVPLQL

SEQ ID NO: 22278 - protein, 9 aa, synthetic construct
  REGION 1..9: note = Description of Artificial Sequence: Synthetic peptide
IQDNSEIKV

SEQ ID NO: 22279 - protein, 8 aa, synthetic construct
  REGION 1..8: note = Description of Artificial Sequence: Synthetic peptide
YSDTIYKL

SEQ ID NO: 22280 - protein, 9 aa, synthetic construct
  REGION 1..9: note = Description of Artificial Sequence: Synthetic peptide
VLDVGDAYF

SEQ ID NO: 22281 - protein, 9 aa, synthetic construct
  REGION 1..9: note = Description of Artificial Sequence: Synthetic peptide
NADKLWVTV

SEQ ID NO: 22282 - protein, 9 aa, synthetic construct
  REGION 1..9: note = Description of Artificial Sequence: Synthetic peptide
QRPVVTVKV

SEQ ID NO: 22283 - protein, 9 aa, synthetic construct
  REGION 1..9: note = Description of Artificial Sequence: Synthetic peptide
IRSAHTNDV

SEQ ID NO: 22284 - protein, 9 aa, synthetic construct
  REGION 1..9: note = Description of Artificial Sequence: Synthetic peptide
LILGDINNL

SEQ ID NO: 22285 - protein, 9 aa, synthetic construct
  REGION 1..9: note = Description of Artificial Sequence: Synthetic peptide
SAEPVPLQL

SEQ ID NO: 22286 - protein, 9 aa, synthetic construct
  REGION 1..9: note = Description of Artificial Sequence: Synthetic peptide
FLGAAGSTM

SEQ ID NO: 22287 - protein, 9 aa, synthetic construct
  REGION 1..9: note = Description of Artificial Sequence: Synthetic peptide
TVLDVGDAY

SEQ ID NO: 22288 - protein, 9 aa, synthetic construct
  REGION 1..9: note = Description of Artificial Sequence: Synthetic peptide
LILGNIDNL

SEQ ID NO: 22289 - protein, 9 aa, synthetic construct
  REGION 1..9: note = Description of Artificial Sequence: Synthetic peptide
AVTSSNTAF

SEQ ID NO: 22290 - protein, 9 aa, synthetic construct
  REGION 1..9: note = Description of Artificial Sequence: Synthetic peptide
IVTDSQYAL

SEQ ID NO: 22291 - protein, 9 aa, synthetic construct
  REGION 1..9: note = Description of Artificial Sequence: Synthetic peptide
KALGPGASL

SEQ ID NO: 22292 - protein, 9 aa, synthetic construct
  REGION 1..9: note = Description of Artificial Sequence: Synthetic peptide
SQVTNPVVM

SEQ ID NO: 22293 - protein, 9 aa, synthetic construct
  REGION 1..9: note = Description of Artificial Sequence: Synthetic peptide
SQVTNSAVM

SEQ ID NO: 22294 - protein, 9 aa, synthetic construct
  REGION 1..9: note = Description of Artificial Sequence: Synthetic peptide
ALVEICTEM

SEQ ID NO: 22295 - protein, 9 aa, synthetic construct
  REGION 1..9: note = Description of Artificial Sequence: Synthetic peptide
EQSPPLTSL

SEQ ID NO: 22296 - protein, 9 aa, synthetic construct
  REGION 1..9: note = Description of Artificial Sequence: Synthetic peptide
ATDIQTKEL

SEQ ID NO: 22297 - protein, 9 aa, synthetic construct
  REGION 1..9: note = Description of Artificial Sequence: Synthetic peptide
TQDFWEVQL

SEQ ID NO: 22298 - protein, 8 aa, synthetic construct
  REGION 1..8: note = Description of Artificial Sequence: Synthetic peptide
HTDNGTNF

SEQ ID NO: 22299 - protein, 9 aa, synthetic construct
  REGION 1..9: note = Description of Artificial Sequence: Synthetic peptide
SAEPVPLQL

SEQ ID NO: 22300 - protein, 8 aa, synthetic construct
  REGION 1..8: note = Description of Artificial Sequence: Synthetic peptide
YSDTIYKL

SEQ ID NO: 22301 - protein, 8 aa, synthetic construct
  REGION 1..8: note = Description of Artificial Sequence: Synthetic peptide
GQMVHQAL

SEQ ID NO: 22302 - protein, 9 aa, synthetic construct
  REGION 1..9: note = Description of Artificial Sequence: Synthetic peptide
GQKAIGTVL

SEQ ID NO: 22303 - protein, 10 aa, synthetic construct
  REGION 1..10: note = Description of Artificial Sequence: Synthetic peptide
SLFGSDPLSQ

SEQ ID NO: 22304 - protein, 9 aa, synthetic construct
  REGION 1..9: note = Description of Artificial Sequence: Synthetic peptide
KALGSGATL

SEQ ID NO: 22305 - protein, 10 aa, synthetic construct
  REGION 1..10: note = Description of Artificial Sequence: Synthetic peptide
VTFEPIPIHY

SEQ ID NO: 22306 - protein, 10 aa, synthetic construct
  REGION 1..10: note = Description of Artificial Sequence: Synthetic peptide
VSFEPIPIHY

SEQ ID NO: 22307 - protein, 9 aa, synthetic construct
  REGION 1..9: note = Description of Artificial Sequence: Synthetic peptide
GAASITLTV

SEQ ID NO: 22308 - protein, 9 aa, synthetic construct
  REGION 1..9: note = Description of Artificial Sequence: Synthetic peptide
SQVTNPVVM

SEQ ID NO: 22309 - protein, 9 aa, synthetic construct
  REGION 1..9: note = Description of Artificial Sequence: Synthetic peptide
NTKNIIVQL

SEQ ID NO: 22310 - protein, 9 aa, synthetic construct
  REGION 1..9: note = Description of Artificial Sequence: Synthetic peptide
KTKPPVPSV

SEQ ID NO: 22311 - protein, 8 aa, synthetic construct
  REGION 1..8: note = Description of Artificial Sequence: Synthetic peptide
SFNITTEL

SEQ ID NO: 22312 - protein, 10 aa, synthetic construct
  REGION 1..10: note = Description of Artificial Sequence: Synthetic peptide
AFPQGEAREF

SEQ ID NO: 22313 - protein, 9 aa, synthetic construct
  REGION 1..9: note = Description of Artificial Sequence: Synthetic peptide
IYQEPHKNL

SEQ ID NO: 22314 - protein, 9 aa, synthetic construct
  REGION 1..9: note = Description of Artificial Sequence: Synthetic peptide
IYQEPYKNL

SEQ ID NO: 22315 - protein, 9 aa, synthetic construct
  REGION 1..9: note = Description of Artificial Sequence: Synthetic peptide
HFKNGTITF

SEQ ID NO: 22316 - protein, 10 aa, synthetic construct
  REGION 1..10: note = Description of Artificial Sequence: Synthetic peptide
GFLGAAGSTM

SEQ ID NO: 22317 - protein, 9 aa, synthetic construct
  REGION 1..9: note = Description of Artificial Sequence: Synthetic peptide
TYQIYQEPY

SEQ ID NO: 22318 - protein, 9 aa, synthetic construct
  REGION 1..9: note = Description of Artificial Sequence: Synthetic peptide
LFNTVATLY

SEQ ID NO: 22319 - protein, 9 aa, synthetic construct
  REGION 1..9: note = Description of Artificial Sequence: Synthetic peptide
LYNTIAVLY

SEQ ID NO: 22320 - protein, 8 aa, synthetic construct
  REGION 1..8: note = Description of Artificial Sequence: Synthetic peptide
NYPIVQNL

SEQ ID NO: 22321 - protein, 8 aa, synthetic construct
  REGION 1..8: note = Description of Artificial Sequence: Synthetic peptide
SFNITTEL

SEQ ID NO: 22322 - protein, 9 aa, synthetic construct
  REGION 1..9: note = Description of Artificial Sequence: Synthetic peptide
IYQEPHKNL

SEQ ID NO: 22323 - protein, 9 aa, synthetic construct
  REGION 1..9: note = Description of Artificial Sequence: Synthetic peptide
IYQEPYKNL

SEQ ID NO: 22324 - protein, 10 aa, synthetic construct
  REGION 1..10: note = Description of Artificial Sequence: Synthetic peptide
GFLGAAGSTM

SEQ ID NO: 22325 - protein, 10 aa, synthetic construct
  REGION 1..10: note = Description of Artificial Sequence: Synthetic peptide
AFPQGEAREF

SEQ ID NO: 22326 - protein, 8 aa, synthetic construct
  REGION 1..8: note = Description of Artificial Sequence: Synthetic peptide
LYNTIAVL

SEQ ID NO: 22327 - protein, 9 aa, synthetic construct
  REGION 1..9: note = Description of Artificial Sequence: Synthetic peptide
TYQIYQEPY

SEQ ID NO: 22328 - protein, 9 aa, synthetic construct
  REGION 1..9: note = Description of Artificial Sequence: Synthetic peptide
AISIVALVV

SEQ ID NO: 22329 - protein, 9 aa, synthetic construct
  REGION 1..9: note = Description of Artificial Sequence: Synthetic peptide
RIVFTVLSV

SEQ ID NO: 22330 - protein, 9 aa, synthetic construct
  REGION 1..9: note = Description of Artificial Sequence: Synthetic peptide
RSNITGMIL

SEQ ID NO: 22331 - protein, 9 aa, synthetic construct
  REGION 1..9: note = Description of Artificial Sequence: Synthetic peptide
ANSPTSREL

SEQ ID NO: 22332 - protein, 9 aa, synthetic construct
  REGION 1..9: note = Description of Artificial Sequence: Synthetic peptide
GAASITLTV

SEQ ID NO: 22333 - protein, 9 aa, synthetic construct
  REGION 1..9: note = Description of Artificial Sequence: Synthetic peptide
VAREMHPEY

SEQ ID NO: 22334 - protein, 9 aa, synthetic construct
  REGION 1..9: note = Description of Artificial Sequence: Synthetic peptide
VSSGIRKVL

SEQ ID NO: 22335 - protein, 9 aa, synthetic construct
  REGION 1..9: note = Description of Artificial Sequence: Synthetic peptide
ANSPTSREL

SEQ ID NO: 22336 - protein, 10 aa, synthetic construct
  REGION 1..10: note = Description of Artificial Sequence: Synthetic peptide
IATDIQTKEL

SEQ ID NO: 22337 - protein, 9 aa, synthetic construct
  REGION 1..9: note = Description of Artificial Sequence: Synthetic peptide
VAREMHPEY

SEQ ID NO: 22338 - protein, 9 aa, synthetic construct
  REGION 1..9: note = Description of Artificial Sequence: Synthetic peptide
RAIEAQQQM

SEQ ID NO: 22339 - protein, 9 aa, synthetic construct
  REGION 1..9: note = Description of Artificial Sequence: Synthetic peptide
KTKPPVPSV

SEQ ID NO: 22340 - protein, 9 aa, synthetic construct
  REGION 1..9: note = Description of Artificial Sequence: Synthetic peptide
RAIEAQQHL

SEQ ID NO: 22341 - protein, 9 aa, synthetic construct
  REGION 1..9: note = Description of Artificial Sequence: Synthetic peptide
GAASITLTV

SEQ ID NO: 22342 - protein, 9 aa, synthetic construct
  REGION 1..9: note = Description of Artificial Sequence: Synthetic peptide
YETEVHNVW

SEQ ID NO: 22343 - protein, 11 aa, synthetic construct
  REGION 1..11: note = Description of Artificial Sequence: Synthetic peptide
AEIQKQGNDQW

SEQ ID NO: 22344 - protein, 11 aa, synthetic construct
  REGION 1..11: note = Description of Artificial Sequence: Synthetic peptide
SEVNIVTDSQY

SEQ ID NO: 22345 - protein, 9 aa, synthetic construct
  REGION 1..9: note = Description of Artificial Sequence: Synthetic peptide
EEINLPGKW

SEQ ID NO: 22346 - protein, 9 aa, synthetic construct
  REGION 1..9: note = Description of Artificial Sequence: Synthetic peptide
SAEPVPLQL

SEQ ID NO: 22347 - protein, 9 aa, synthetic construct
  REGION 1..9: note = Description of Artificial Sequence: Synthetic peptide
LILGDINNL

SEQ ID NO: 22348 - protein, 9 aa, synthetic construct
  REGION 1..9: note = Description of Artificial Sequence: Synthetic peptide
MIIGGLIGL

SEQ ID NO: 22349 - protein, 8 aa, synthetic construct
  REGION 1..8: note = Description of Artificial Sequence: Synthetic peptide
FALNPNLL
